United States Patent Application Publication US 2011/0182862 A1 - sequence listing, part 27

SEQ ID NO: 39469 - protein, 489 aa, Muscodor strobelii
  misc_feature: SGI Peptide ID NO. 573732
  misc_feature (76)..(425): Pfam Id: PF07690 Pfam Desc: Major Facilitator Superfamily
  misc_feature (69)..(214): Pfam Id: PF07690 Pfam Desc: Major Facilitator Superfamily
  misc_feature (24)..(474): NCBI GI: 189202386 Blast Desc: conserved [Pyrenophora tritici-repentis Pt-1C-BFP] gi|187984628|gb|EDU50116.1| conserved [Pyrenophora tritici-repentis Pt-1C-BFP]
  misc_feature (15)..(478): NCBI GI: 238502241 Blast Desc: MFS monocarboxylate transporter, [Aspergillus flavus NRRL3357] gi|220691164|gb|EED47512.1| MFS monocarboxylate transporter, [Aspergillus flavus NRRL3357]
  misc_feature (29)..(478): NCBI GI: 169775613 Blast Desc: [Aspergillus oryzae RIB40] gi|83771008|dbj|BAE61140.1| protein product [Aspergillus oryzae]
  misc_feature (70)..(478): NCBI GI: 67903226 Blast Desc: AN8600.2 [Aspergillus nidulans FGSC A4] gi|40741444|gb|EAA60634.1| AN8600.2 [Aspergillus nidulans FGSC A4]
  misc_feature (8)..(473): NCBI GI: 119488522 Blast Desc: MFS monocarboxylate transporter, [Neosartorya fischeri NRRL 181] gi|119410869|gb|EAW20814.1| MFS monocarboxylate transporter, [Neosartorya fischeri NRRL 181]
  misc_feature (29)..(474): NCBI GI: 121709674 Blast Desc: MFS monocarboxylate transporter, [Aspergillus clavatus NRRL 1] gi|119400635|gb|EAW11060.1| MFS monocarboxylate transporter, [Aspergillus clavatus NRRL 1]
  misc_feature (59)..(478): NCBI GI: 259483186 Blast Desc: TPA: MFS monocarboxylate transporter, (AFU_orthologue; AFUA_7G00780) [Aspergillus nidulans FGSC A4]
  misc_feature (22)..(473): NCBI GI: 115402443 Blast Desc: [Aspergillus terreus NIH2624] gi|114189144|gb|EAU30844.1| [Aspergillus terreus NIH2624]
  misc_feature (52)..(475): NCBI GI: 119474419 Blast Desc: MFS monocarboxylate transporter, [Neosartorya fischeri NRRL 181] gi|119407238|gb|EAW17188.1| MFS monocarboxylate transporter, [Neosartorya fischeri NRRL 181]
  misc_feature (1)..(459): NCBI GI: 145256263 Blast Desc: An10g00880 [Aspergillus niger CBS 513.88] gi|134078651|emb|CAK40524.1| protein product [Aspergillus niger]
MNDIPSSTFSHLDNPSVCQITMSSHQGQDKAIEAHTTSEEPGVITDIVVDAQTSERGGEETKRKKSVHDYLSIVGLFLVYFITLGQVASFSTYQDYYEVELLSSYSASAISWIGTSQVFLLGIVGLLSGAMYDRGYVHEALFPGFVFVILGLLLLSFSHLFWHILLSQGFLIGIGGALVYIPAISIVSNNFPSGPALPLGIAASGSAVGGIIWPIVFRKLLPVVGFAWVNRVFTLLGLIISVVSYYTLISGEKFASSWPDRCKRPYFFQTPPWREKREATEESISQELELPPSDKLNTLLSAFDGWAYKFLCVGVFFALLGYWVPLFYLVPFASRSLGTSSSYASYLLSIVNAASLFGRIIPAAAGRKLDSVAGITIWSIFLGFTAGSVITIPNAVASRLSQPSNTGLRIGTMWAVGAFAELIGPPIAGALLVERGGKTSYLGCQLFGGLAVLIGALFLIYPARWILTDNRAKKHGAQDDTEDNTENSA

SEQ ID NO: 39470 - DNA, 1014 bp, Muscodor strobelii
  misc_feature: SGI cDNA ID NO. 573734
  misc_feature: Encodes the peptide sequence at SEQ ID NO 39471
atgcaattttctcatatctttggacttgtgcaagccagtttggccattgcgtttccgctctctgagaaggagactggtaataatggcgcgattgctcgagcaggaactacctatttcaatataggccagaattacgctgaggaatggaatgctttcgcttcgggggctaaaaagccggctggcatcagtgtttatggtgatatatacggcggtgcactaaattcggattcacagaatttgctgtcgcagtacgctcagagcaacactggctatgtagaaattggtcttagctggaaagacgctatgacctcgaacggctatacactctatcagggagcacagctatgcaacgatattgcaagcggcaagtttgacgcaaacttacagaagcttgcacagtacttaggtggctttcctggtgtcaaatatctccttagaatcgactacgaggtatccaccaaccttttcgccaacaccgacccttcgggctttgtgcctgctaccttcgaccttacagcatacccgaaggctttcgcacatgtgcgacaagtcatatctggtattgtctcaaatgtagaatacgtctaccaccctgtccgaggtcaagcctccatgctgtatcccggagatgatgtcgtggactggcagggcttctctatattcaacaacgatgtttgcctgcccgtcggcccaacgaccaattgcgaaggtcagaccctagatcagaacgtcatcgcagatatcaagtttgcgaccaagccaaagattgtgtccgagtctgccgtccagcccccggccgccagcaatgtgaacgactttatcacatacttgacccgcgtcaaggatatggtagagacatacgactttgctgcatggacttacatcaacagcgattggactgcgcacggatgggacgcagccacttggggcgacagccgaattgaagccaatgctcctgtattacagtggtttcaagagaacatcttgaacgatgcgcgctacatttttgggtag

SEQ ID NO: 39471 - protein, 337 aa, Muscodor strobelii
  misc_feature: SGI Peptide ID NO. 573734
  misc_feature (59)..(335): NCBI GI: 224538529 Blast Desc: BACCELL_03423 [Bacteroides cellulosilyticus DSM 14838] gi|224519867|gb|EEF88972.1| BACCELL_03423 [Bacteroides cellulosilyticus DSM 14838]
  misc_feature (35)..(302): NCBI GI: 224538532 Blast Desc: BACCELL_03426 [Bacteroides cellulosilyticus DSM 14838] gi|224519870|gb|EEF88975.1| BACCELL_03426 [Bacteroides cellulosilyticus DSM 14838]
  misc_feature (118)..(335): NCBI GI: 7594905 Blast Desc: endo-1,3-beta-xylanase [Vibrio sp. XY-214]
  misc_feature (119)..(328): NCBI GI: 134104103 Blast Desc: endo-1,3-beta-xylanase [Vibrio sp. XY-214]
  misc_feature (119)..(328): NCBI GI: 52782169 Blast Desc: beta-1,3-xylanase [Vibrio sp. AX-4]
  misc_feature (11)..(335): NCBI GI: 17826954 Blast Desc: beta-1,3-xylanase [Pseudomonas sp. ND137]
MQFSHIFGLVQASLAIAFPLSEKETGNNGAIARAGTTYFNIGQNYAEEWNAFASGAKKPAGISVYGDIYGGALNSDSQNLLSQYAQSNTGYVEIGLSWKDAMTSNGYTLYQGAQLCNDIASGKFDANLQKLAQYLGGFPGVKYLLRIDYEVSTNLFANTDPSGFVPATFDLTAYPKAFAHVRQVISGIVSNVEYVYHPVRGQASMLYPGDDVVDWQGFSIFNNDVCLPVGPTTNCEGQTLDQNVIADIKFATKPKIVSESAVQPPAASNVNDFITYLTRVKDMVETYDFAAWTYINSDWTAHGWDAATWGDSRIEANAPVLQWFQENILNDARYIFG

SEQ ID NO: 39472 - DNA, 1512 bp, Muscodor strobelii
  misc_feature: SGI cDNA ID NO. 573735
  misc_feature: Encodes the peptide sequence at SEQ ID NO 39473
atgcttttcaatgtactccagatgttcctattctatgtttttcgcgtctgtcagctattccgattagtcgcatcacccgttcccaataatagattacaagatgtcctacctcagattgaggctcttcggggtgttggcggtacggctggcatgtccattggcgtgatgcgtcggggtaccatagtcttagtgcgtcacatcgggttttccgacgtcgaaaatgagatcgttgcgaactcgtctactctctatcccctcggctcgctcacgaaggcatttatcgctgtgacaatcgcacagcttgtccacgagggtcttttgcactgggatgtgccaattaccgcctacatacccgagctttcttttaaaactgatcgaacacttgctagtcacctgacactagtcgatatactctcccacaacacaggccttcaacggctggacgcgctttggttaggcgccgaaggcgaagtcatagcgccaaggaactcgacccttatgctctgcagtcacctccgccctgtatactcactccgttcaaaatggctctataacaattggatgtatgctttagctggcgaaatcatcgaacgtgtcacggatatgacttggagtcaaattttagagaaaaaggtcctttgcaaactaaaccttacgaacaccgctgtcgtcgcgtcagccatccctaaggccacaaccgcattgccttatcttgttctagatgacttatcacttgctcgtagcagcgatctaggccttacggctgatgagttgatgtcgtctgcggtgtccaaagtttttgatgaactgtactcgatggggtttgccaaagtggtaacacctgctcagttcggaaaaattggtttcaaccccagtctcttaactgagatgcctaccatcgggcgtaattctagccatcatgtcttttaccacaatggggctttgccaggatataatcattgttttatgattattcctggcctcgacgcagttatcgtggtcttgaccaactcagtatctcaaggagacacagcagactgggcggcacaaacactacttcaggccgtattagacgtcgacaagccggtggatttgatgtccttcgctcaaattgctgcacgagaatggagaacaacgtacaatcgaatctcagcgacgttaaagggagaacgaattctgggaaccaacgagccgtcacatagtgaactgctggggatctactaccacagcaccggggcgctctacatcgaggtctacgcaagcaaacacaaagatttgatgttcaaaatcaacggaaaggagacgcaagcacacacactgtcacattatcattattccactttcatgttccttccgtctgccgatgagagaatccgccgaggtttgtttcactatgggccgcacgcctggctattgtcgtttggatggaactcacgtggagaggttgaccgggtagaatggaacctagacgagcaaccggaaggggatgtagaagtctttattcgagaatga

SEQ ID NO: 39473 - protein, 503 aa, Muscodor strobelii
  misc_feature: SGI Peptide ID NO. 573735
  misc_feature (36)..(355): Pfam Id: PF00144 Pfam Desc: Beta-lactamase
  misc_feature (36)..(234): Pfam Id: PF00144 Pfam Desc: Beta-lactamase
  misc_feature (309)..(355): Pfam Id: PF00144 Pfam Desc: Beta-lactamase
  misc_feature (35)..(458): NCBI GI: 46119880 Blast Desc: FG04809.1 [Gibberella zeae PH-1]
  misc_feature (264)..(472): NCBI GI: 255957007 Blast Desc: Pc21g22890 [Penicillium chrysogenum Wisconsin 54-1255] gi|211590967|emb|CAP97186.1| Pc21g22890 [Penicillium chrysogenum Wisconsin 54-1255]
  misc_feature (23)..(496): NCBI GI: 256723497 Blast Desc: NECHADRAFT_42336 [Nectria haematococca mpVI 77-13-4]
  misc_feature (45)..(494): NCBI GI: 46119888 Blast Desc: FG04813.1 [Gibberella zeae PH-1]
  misc_feature (37)..(497): NCBI GI: 46102717 Blast Desc: FG00057.1 [Gibberella zeae PH-1]
  misc_feature (32)..(502): NCBI GI: 256722709 Blast Desc: NECHADRAFT_53115 [Nectria haematococca mpVI 77-13-4]
  misc_feature (31)..(502): NCBI GI: 115387473 Blast Desc: [Aspergillus terreus NIH2624] gi|114195326|gb|EAU37026.1| [Aspergillus terreus NIH2624]
  misc_feature (24)..(495): NCBI GI: 255938135 Blast Desc: Pc13g14300 [Penicillium chrysogenum Wisconsin 54-1255] gi|211584458|emb|CAP92499.1| Pc13g14300 [Penicillium chrysogenum Wisconsin 54-1255]
  misc_feature (32)..(500): NCBI GI: 258572668 Blast Desc: [Uncinocarpus reesii 1704] gi|237905366|gb|EEP79767.1| [Uncinocarpus reesii 1704]
  misc_feature (39)..(503): NCBI GI: 256723834 Blast Desc: NECHADRAFT_37243 [Nectria haematococca mpVI 77-13-4]
MLFNVLQMFLFYVFRVCQLFRLVASPVPNNRLQDVLPQIEALRGVGGTAGMSIGVMRRGTIVLVRHIGFSDVENEIVANSSTLYPLGSLTKAFIAVTIAQLVHEGLLHWDVPITAYIPELSFKTDRTLASHLTLVDILSHNTGLQRLDALWLGAEGEVIAPRNSTLMLCSHLRPVYSLRSKWLYNNWMYALAGEIIERVTDMTWSQILEKKVLCKLNLTNTAVVASAIPKATTALPYLVLDDLSLARSSDLGLTADELMSSAVSKVFDELYSMGFAKVVTPAQFGKIGFNPSLLTEMPTIGRNSSHHVFYHNGALPGYNHCFMIIPGLDAVIVVLTNSVSQGDTADWAAQTLLQAVLDVDKPVDLMSFAQIAAREWRTTYNRISATLKGERILGTNEPSHSELLGIYYHSTGALYIEVYASKHKDLMFKINGKETQAHTLSHYHYSTFMFLPSADERIRRGLFHYGPHAWLLSFGWNSRGEVDRVEWNLDEQPEGDVEVFIRE

SEQ ID NO: 39474 - DNA, 549 bp, Muscodor strobelii
  misc_feature: SGI cDNA ID NO. 573736
  misc_feature: Elevated expression when VOC is produced
  misc_feature: Encodes the peptide sequence at SEQ ID NO 39475
atgtctaccagtactgcaaaacacagcgcaacacgcgccctccttgaggacgccgatgtccagttttggactgatgccctcaacaatgttgcggaagaccctgccgccagtctcatgtcttcctcccctgcgggagcgggaagctggttcactagtctcttctcctgtctcgatccttttgatgaatgcctcgtcacctggtgtttgccttctgtcaccttcgggaagacacaccaccgcatgaacaaggatgccaacctcgtcggatacaaaccggtgaacacctcgtgtctctttttctgcggcgcatcacactgcggtgggtggtggctcccgacgctcctccagcgcgttgagatccggaagcgatacaatctgcagggcaacttcctcctagatcttgcaacggcgtgcttctgccacacatgtattcttgtccaaaatggcaaagaagttgctcaccgtgccggtactagcaaacctaatactacaggctatgaagccaaccacgacacaatggcctacccaacaggccctcatcaccagtag

SEQ ID NO: 39475 - protein, 182 aa, Muscodor strobelii
  misc_feature: SGI Peptide ID NO. 573736
  misc_feature (49)..(152): Pfam Id: PF04749 Pfam Desc: PLAC8 family
  misc_feature (15)..(176): NCBI GI: 116201869 Blast Desc: CHGG_08819 [Chaetomium globosum CBS 148.51] gi|88177337|gb|EAQ84805.1| CHGG_08819 [Chaetomium globosum CBS 148.51]
  misc_feature (6)..(176): NCBI GI: 256727218 Blast Desc: NECHADRAFT_34156 [Nectria haematococca mpVI 77-13-4]
  misc_feature (15)..(170): NCBI GI: 46110759 Blast Desc: FG02261.1 [Gibberella zeae PH-1]
  misc_feature (15)..(157): NCBI GI: 171693339 Blast Desc: protein product [Podospora anserina] gi|170946618|emb|CAP73420.1| protein product [Podospora anserina]
  misc_feature (15)..(182): NCBI GI: 171681630 Blast Desc: protein product [Podospora anserina] gi|170940774|emb|CAP66423.1| protein product [Podospora anserina]
  misc_feature (14)..(180): NCBI GI: 39963897 Blast Desc: MGG_09795 [Magnaporthe grisea 70-15] gi|145011093|gb|EDJ95749.1| MGG_09795 [Magnaporthe grisea 70-15]
  misc_feature (48)..(176): NCBI GI: 119495088 Blast Desc: PLAC8 family protein [Neosartorya fischeri NRRL 181] gi|119412499|gb|EAW22440.1| PLAC8 family protein [Neosartorya fischeri NRRL 181]
  misc_feature (48)..(176): NCBI GI: 240280537 Blast Desc: PLAC8 family protein [Ajellomyces capsulatus H143]
  misc_feature (48)..(176): NCBI GI: 225560906 Blast Desc: PLAC8 family protein [Ajellomyces capsulatus G186AR]
  misc_feature (48)..(176): NCBI GI: 256730269 Blast Desc: NECHADRAFT_82596 [Nectria haematococca mpVI 77-13-4]
  misc_feature: Useful for introducing or modulating the production of volatile compounds
MSTSTAKHSATRALLEDADVQFWTDALNNVAEDPAASLMSSSPAGAGSWFTSLFSCLDPFDECLVTWCLPSVTFGKTHHRMNKDANLVGYKPVNTSCLFFCGASHCGGWWLPTLLQRVEIRKRYNLQGNFLLDLATACFCHTCILVQNGKEVAHRAGTSKPNTTGYEANHDTMAYPTGPHHQ

SEQ ID NO: 39476 - DNA, 794 bp, Muscodor strobelii
  misc_feature: SGI EST ID NO. CUFF.95030.0
  misc_feature: Variant of the nucleotide sequence at SEQ ID NO 39474
tctacatccactatttcagagatctacgctctttatactattccagtcgctcttttgatccttcaattaccatgtctaccagtactgcaaaacacagcgcaacacgcgccctccttgaggacgccgatgtccagttttggactgatgccctcaacaatgttgcggaagaccctgccgccagtctcatgtcttcctcccctgcgggagcgggaagctggttcactagtctcttctcctgtctcgatccttttgatgaatgcctcgtcacctggtgtttgccttctgtcaccttcgggaagacacaccaccgcatgaacaaggatgccaacctcgtcggatacaaaccggtgaacacctcgtgtctctttttctgcggcgcatcacactgcggtgggtggtggctcccgacgctcctccagcgcgttgagatccggaagcgatacaatctgcagggcaacttcctcctagatcttgcaacggcgtgcttctgccacacatgtattcttgtccaaaatggcaaagaagttgctcaccgtgccggtactagcaaacctaatactacaggctatgaagccaaccacgacacaatggcctacccaacaggccctcatcaccagtagctcgtggacttgaaataccttcatgtctcaatatgatcaaggatgatcaacgggagttgctatgaagagatttttatcggtggtctaatctgcaatattggactgaacagaggcctattgcccagtttgtttgagctttgtcaagtacttcctagtttcaatagagaatttcag

SEQ ID NO: 39477 - DNA, 1590 bp, Muscodor strobelii
  misc_feature: SGI cDNA ID NO. 573737
  misc_feature: Encodes the peptide sequence at SEQ ID NO 39478
atgtgtaacgaacatgatacaacattctttcctaagcgcgtgcttcgtctcaatctcaccgacgagctgatcagaatagaagagaataacccgatcatatctgaggagccgaacaccgcgcatagtagaccgcataatctcaccagtcccaactatgcgtgcctcagccactgctggggcaggtccagatccccatttctgactacagtaggaacgctcgaacaaaaaaaggggggcatcctcgtcaaagacctcccacaaacattccaagatgccgtatacgttgctcgtaaccttcatattgattatttgtggattgactccctctgcatcgttcaagatgacgagcaagactggttagaccaggctcccctgatgggcacgatttatcgcaatgcccatttggtcattgctgctggaagtgcctcaagtgacgacgacgggtttttcctgcgtaagaagtccgtcaaaatgcaccatttcacaattaaccatgatcactcgaactcttccattaaattgactgtgtccatgcgcatgatgcctccccatcccgacagcagatactcgaatggagacgacgaactgcctatatccactcgggcgtggattctgcaagaaaaactgctagctagacggttcttgacttttgggacttacgagatgctctgggagtgcctcgacaaggtgtatttgaagtacgatttagccagaatcggtcacgagcaacgtagaatagtattgaacgactggcacacagttgtctcaagatatacaaagcgaaatcttaccatgaaaagggacagacttccggccatctctgctcttgcgaaactattccaagaaaccctccaggatcgatatcttgctggcatgtggcgatctaggctagagagagaactcgattggatattatcaagtgtagatttatcagaaggccaacggtcaacaaatggtccctcctggtcatgggttagcgcagcgaaaggcaatgcccttttaccggatatacgagaacccgaagaatcagacgagtatacaatcacagtagaggatgcaaaagtcgatttgcagggtctggattctttcggtcaggtgaacggcggggagcttgtgttatctggctgccttctccggctcaagctgcagcatgatattccatcgtctacggacggtttccgatccgggactgattgtctgcgggcccatattctccccttgacggatgtctcggtagcactggataacgagaagacagagagtggtgaagctcagcaggtgtccccgacaatacaagcgagaacgcaattcttcccggacttcgtattctggcatagtctcgaggacatgaataagcgactagagtgtgtgcactatttcctgacgcgccggtctggctttgaccatagatctctacatctctgtggtctagttcttcgggaggtggagagccggcaatccaactcgattacaacctacgaacgaattgctaattttcggttcttcttcgatgctactgcgaaccagccggaaatcaacgttccaaaagaactacttgacatgccaaggcaaaggattattataaaataa

SEQ ID NO: 39478 - protein, 529 aa, Muscodor strobelii
  misc_feature: SGI Peptide ID NO. 573737
  misc_feature (52)..(207): Pfam Id: PF06985 Pfam Desc: Heterokaryon incompatibility protein (HET)
  misc_feature (52)..(146): Pfam Id: PF06985 Pfam Desc: Heterokaryon incompatibility protein (HET)
  misc_feature (31)..(381): NCBI GI: 171693065 Blast Desc: protein product [Podospora anserina] gi|170946481|emb|CAP73282.1| protein product [Podospora anserina]
  misc_feature (1)..(519): NCBI GI: 225558616 Blast Desc: HET domain-containing protein [Ajellomyces capsulatus G186AR]
  misc_feature (52)..(381): NCBI GI: 238502093 Blast Desc: conserved [Aspergillus flavus NRRL3357] gi|220691090|gb|EED47438.1| conserved [Aspergillus flavus NRRL3357]
  misc_feature (49)..(382): NCBI GI: 40882307 Blast Desc: related to tol protein [Neurospora crassa]
  misc_feature (1)..(386): NCBI GI: 226286490 Blast Desc: conserved [Paracoccidioides brasiliensis Pb01]
  misc_feature (52)..(386): NCBI GI: 116214435 Blast Desc: CHGG_11058 [Chaetomium globosum CBS 148.51] gi|88175413|gb|EAQ82882.1| CHGG_11058 [Chaetomium globosum CBS 148.51]
  misc_feature (1)..(411): NCBI GI: 154286502 Blast Desc: [Ajellomyces capsulatus NAm1] gi|150407687|gb|EDN03228.1| [Ajellomyces capsulatus NAm1]
  misc_feature (10)..(382): NCBI GI: 238495750 Blast Desc: conserved [Aspergillus flavus NRRL3357] gi|220695761|gb|EED52104.1| conserved [Aspergillus flavus NRRL3357]
  misc_feature (1)..(370): NCBI GI: 116206180 Blast Desc: CHGG_02383 [Chaetomium globosum CBS 148.51] gi|88182980|gb|EAQ90448.1| CHGG_02383 [Chaetomium globosum CBS 148.51]
  misc_feature (1)..(386): NCBI GI: 225680144 Blast Desc: conserved [Paracoccidioides brasiliensis Pb03]
MCNEHDTTFFPKRVLRLNLTDELIRIEENNPIISEEPNTAHSRPHNLTSPNYACLSHCWGRSRSPFLTTVGTLEQKKGGILVKDLPQTFQDAVYVARNLHIDYLWIDSLCIVQDDEQDWLDQAPLMGTIYRNAHLVIAAGSASSDDDGFFLRKKSVKMHHFTINHDHSNSSIKLTVSMRMMPPHPDSRYSNGDDELPISTRAWILQEKLLARRFLTFGTYEMLWECLDKVYLKYDLARIGHEQRRIVLNDWHTVVSRYTKRNLTMKRDRLPAISALAKLFQETLQDRYLAGMWRSRLERELDWILSSVDLSEGQRSTNGPSWSWVSAAKGNALLPDIREPEESDEYTITVEDAKVDLQGLDSFGQVNGGELVLSGCLLRLKLQHDIPSSTDGFRSGTDCLRAHILPLTDVSVALDNEKTESGEAQQVSPTIQARTQFFPDFVFWHSLEDMNKRLECVHYFLTRRSGFDHRSLHLCGLVLREVESRQSNSITTYERIANFRFFFDATANQPEINVPKELLDMPRQRIIIK

SEQ ID NO: 39479 - DNA, 2316 bp, Muscodor strobelii
  misc_feature: SGI EST ID NO. CUFF.95035.0
  misc_feature: Variant of the nucleotide sequence at SEQ ID NO 39477
gaagaaagccattgcatacttagaaaacgtagccaaacaccgcgcttgattggctgaaattgcaagctaggccaactaccttataataagtattcaaagtgcaaaaagcctggccaaccattcatactgcataggttgggttcggtagtgcgctgctccaactgtaggcctgtagcgcgtcagctcattgagctgcccagaatctccaatgagaagcccatcttctataccccgcgttgcgagctcacgtacctctcttattctaaacaaatatctcgttttttgcctccagcccatcgaactacttgtctgtagagaattcagtcattaagggactgattctctagcggcctctatcatgtctgtccatattactgagtgtctgatttgcagctacccctggaagcaaggttcttatcctaagcacgactccaagaaaccgggagacgaactttttggacctaaaaccaacttttcattcacagacgttgatactgtcttagctctactgtcggcgtcgtgcatcggttgtcggatactatcagagggcgtaactttctggaaacaagaacagcaggaagattggatatggacgatgaagtacgagtgctgcgatagcactacgctgcggatcaaaatagctgggtcttcttcaagagacacggtcatagatgtgcaagtcgctcccacctccgaagtcttggtaggagttgagactacgccaacagcacgaagtaatagtctgaacaatcaagactgggtccgaattgatcaatggatccaaaactgtagcagaagtcacttcatgtgtaacgaacatgatacaacattctttcctaagcgcgtgcttcgtctcaatctcaccgacgagctgatcagaatagaagagaataacccgatcatatctgaggagccgaacaccgcgcatagtagaccgcataatctcaccagtcccaactatgcgtgcctcagccactgctggggcaggtccagatccccatttctgactacagtaggaacgctcgaacaaaaaaaggggggcatcctcgtcaaagacctcccacaaacattccaagatgccgtatacgttgctcgtaaccttcatattgattatttgtggattgactccctctgcatcgttcaagatgacgagcaagactggttagaccaggctcccctgatgggcacgatttatcgcaatgcccatttggtcattgctgctggaagtgcctcaagtgacgacgacgggtttttcctgcgtaagaagtccgtcaaaatgcaccatttcacaattaaccatgatcactcgaactcttccattaaattgactgtgtccatgcgcatgatgcctccccatcccgacagcagatactcgaatggagacgacgaactgcctatatccactcgggcgtggattctgcaagaaaaactgctagctagacggttcttgacttttgggacttacgagatgctctgggagtgcctcgacaaggtgtattgtgagtgctctacctttagtgaacagtatagagaacaagaccatccagatgcaaggaacttccatgactgtatgtcagtgaagtacgatttagccagaatcggtcacgagcaacgtagaatagtattgaacgactggcacacagttgtctcaagatatacaaagcgaaatcttaccatgaaaagggacagacttccggccatctctgctcttgcgaaactattccaagaaaccctccaggatcgatatcttgctggcatgtggcgatctaggctagagagagaactcgattggatattatcaagtgtagatttatcagaaggccaacggtcaacaaatggtccctcctggtcatgggttagcgcagcgaaaggcaatgcccttttaccggatatacgagaacccgaagaatcagacgagtatacaatcacagtagaggatgcaaaagtcgatttgcagggtctggattctttcggtcaggtgaacggcggggagcttgtgttatctggctgccttctccggctcaagctgcagcatgatattccatcgtctacggacggtttccgatccgggactgattgtctgcgggcccatattctccccttgacggatgtctcggtaacttagcagatcacttattcagactcaaacatggctaacggatcgataggtagcactggataacgagaagacagagagtggtgaagctcagcaggtgtccccgacaatacaagcgagaacgcaattcttcccggacttcgtattctggcatagtctcgaggacatgaataagcgactagagtgtgtgcactatttcc

SEQ ID NO: 39480 - DNA, 915 bp, Muscodor strobelii
  misc_feature: SGI cDNA ID NO. 573738
  misc_feature: Elevated expression when VOC is produced
  misc_feature: Encodes the peptide sequence at SEQ ID NO 39481
atgtccatcaatgggacagatgcaaacagtcatttctccgctgcagaggcttgctcggcatcagtttcacttgctgatctcgatcctagcgctattgttacgagagcagatgttgacctaaaaccatggaaatatgccggctaccgtgattatgccaatctcatagcatctgaagatgattttttcgtactcagacgattcactcgactcagtgttcgaattgcgcttctccttcaagacgagattgtggaattggaggaggaattggattctatagacgagatgaacagcagaaagagctccgaagacattcacaatggctctttccgtgacgatcagaatgatcgcaaagctcttctaaaaacgattcgaatccgaatcaaagactacaatgactttgtcttgcagcaagcagcgatgaagaagttccacaaagcacgaaaacaagacatcaagtcgctgcaaaattggcatttcaaccatgactatgcagcaatatcaccagaagagcagaaatatctcgatcacgacgacctattcggagtcataccaaaggaaaagattccactacgcaaactcatcgacaactcccgaaggcttcgtacgctgtcactgtggcgacggaccgatgtcgaaggcgacagagatgtgagatactactcggagaaacgaatcaacgcatttgcctccagcctaattgtaggattaggcggtagtctccttcttgccccattatggattctgtacacattacagagcactgcactgaaactgtcagtgattactgtgtttgttgcgacttttctcgtgacactgtctttcactcttgtgatgaaaccatttgaagcactcggtgcaaccgccgcatacgctgctgttttgacggtgttcttgcaggttggcactgacaattaa

SEQ ID NO: 39481 - protein, 304 aa, Muscodor strobelii
  misc_feature: SGI Peptide ID NO. 573738
  misc_feature (41)..(289): NCBI GI: 171685542 Blast Desc: protein product [Podospora anserina] gi|170942732|emb|CAP68385.1| protein product [Podospora anserina]
  misc_feature (37)..(304): NCBI GI: 256732079 Blast Desc: NECHADRAFT_80333 [Nectria haematococca mpVI 77-13-4]
  misc_feature (5)..(301): NCBI GI: 189204077 Blast Desc: PTRG_08042 [Pyrenophora tritici-repentis Pt-1C-BFP] gi|187985473|gb|EDU50961.1| PTRG_08042 [Pyrenophora tritici-repentis Pt-1C-BFP]
  misc_feature (41)..(302): NCBI GI: 169619281 Blast Desc: SNOG_12835 [Phaeosphaeria nodorum SN15] gi|111058515|gb|EAT79635.1| SNOG_12835 [Phaeosphaeria nodorum SN15]
  misc_feature (29)..(303): NCBI GI: 116199503 Blast Desc: [Chaetomium globosum CBS 148.51] gi|88179186|gb|EAQ86654.1| [Chaetomium globosum CBS 148.51]
  misc_feature (37)..(130): NCBI GI: 169605277 Blast Desc: SNOG_05661 [Phaeosphaeria nodorum SN15] gi|111065605|gb|EAT86725.1| SNOG_05661 [Phaeosphaeria nodorum SN15]
  misc_feature (47)..(298): NCBI GI: 256722189 Blast Desc: NECHADRAFT_52473 [Nectria haematococca mpVI 77-13-4]
  misc_feature (47)..(299): NCBI GI: 46126473 Blast Desc: FG07614.1 [Gibberella zeae PH-1]
  misc_feature (47)..(298): NCBI GI: 46138151 Blast Desc: FG10590.1 [Gibberella zeae PH-1]
  misc_feature (47)..(299): NCBI GI: 256724957 Blast Desc: NECHADRAFT_91425 [Nectria haematococca mpVI 77-13-4]
  misc_feature: Useful for introducing or modulating the production of volatile compounds
MSINGTDANSHFSAAEACSASVSLADLDPSAIVTRADVDLKPWKYAGYRDYANLIASEDDFFVLRRFTRLSVRIALLLQDEIVELEEELDSIDEMNSRKSSEDIHNGSFRDDQNDRKALLKTIRIRIKDYNDFVLQQAAMKKFHKARKQDIKSLQNWHFNHDYAAISPEEQKYLDHDDLFGVIPKEKIPLRKLIDNSRRLRTLSLWRRTDVEGDRDVRYYSEKRINAFASSLIVGLGGSLLLAPLWILYTLQSTALKLSVITVFVATFLVTLSFTLVMKPFEALGATAAYAAVLTVFLQVGTDN

SEQ ID NO: 39482 - DNA, 2497 bp, Muscodor strobelii
  misc_feature: SGI EST ID NO. CUFF.95065.0
  misc_feature: Variant of the nucleotide sequence at SEQ ID NO 39480
gatatttcttccaagtggatgtgctctttgatagtaattcaaataatcccacgaaactcagagatgtatgcttcccatccttggctttgtctcgcgtccgctgcagggaccagccgttgtgatgtcggtccaattgaggcacacttgccgccagagagctcagatctaccctcggcctattccaactctgcttgccgtcattatgataggttctcattacgaaatcgtttgtcgggcggcgagatgtgctcatctcaatacctggattgccccagcttttccggtcgcttcgtcttagacgatgcgtcgatcgatgatgacaaggacaaagactctttgcttttcctgcggtcacgtattgcagagcttttaggaagtggaggttctgctttcacctgtcggtctgtccgtcgccttacttcggcgctatgtagaacgccgtgagctcccagatagctgctaagagcagcggtgccgaactgtgctttcatattgtaaagtacatcttcctctctcactacatttctgcgttgtcgagcagtgcgatcgttttgctgtagcattgcgcgatgagcttcagtaccatatgcagctttgatgtcccgcagaacatgtcctccaagataaattgtttctccacgacattcgccggcgttcctcaaacccttggccgcgagataatcggaaaattggtccgaccagccgttttccatttgattaatcgactgggaggactctcgagtcctttgtcgtctcaccgccattccgcctgaggactgatagaattgtcgccggtccttctgattgacgttcgaatggagcagcgtgagcaattagcggcaacaaggttggttagcagctgtccaacgttgtgctactagttctcgcgaattcgtcttcaggcacaggcaaagtatggataatgtgtctcagacagtgccgtcacggattttcgcagcgatatgtatacaattgaacgagtgtgggaggcagagaaactagttgccgtcagtcaatgagggggatctcttgttatatttggaggccgcctaatgcatctcccaatgcttgtggctgtgcagtagtgttttcatcttgataatgtgttggggtacagatttatgacgtgtgtgccatgtactgaagggtgattggtgcgaactgcatgataggaaagccaacgacatggagcgcggggctgtgaagatacatctacaccaagcgatactatatgagtagacgagttcttgttgttgccttcatttgaatacaattgaaaaatatactatacctgatgctaattgacgaccagaactcgcagatagcttgagtcaagcatgtccatcaatgggacagatgcaaacagtcatttctccgctgcagaggcttgctcggcatcagtttcacttgctgatctcgatcctagcgctattgttacgagagcagatgttgacctaaaaccatggaaatatgccggctaccgtgattatgccaatctcatagcatctgaagatgattttttcgtactcagacgattcactcgactcagtgttcgaattgcgcttctccttcaagacgagattgtggaattggaggaggaattggattctatagacgagatgaacagcagaaagagctccgaagacattcacaatggctctttccgtgacgatcagaatgatcgcaaagctcttctaaaaacgattcgaatccgaatcaaagactacaatgactttgtcttgcagcaagcagcgatgaagaagttccacaaagcacgaaaacaagacatcaagtcgctgcaaaattggcatttcaaccatgactatgcagcaatatcaccagaagagcagaaatatctcgatcacgacgacctattcggagtcataccaaaggaaaagattccactacgcaaactcatcgacaactcccgaaggcttcgtacgctgtcactgtggcgacggaccgatgtcgaaggcgacagagatgtgagatactactcggagaaacgaatcaacgcatttgcctccagcctaattgtaggattaggcggtagtctccttcttgccccattatggattctgtacacattacagagcactgcactgaaactgtcagtgattactgtgtttgttgcgacttttctcgtgacactgtctttcactcttgtgatgaaaccatttgaagcactcggtgcaaccgccgcatacgctgctgttttgacggtgttcttgcaggttggcactgacaattaagattcaaacactaatcagtatcccacaatatctcgctggagttgagggttagaatcaatgctgcaagcacatctcatatcagtctacaataatgtgtatttctttcgaagggctcgagctagatacaatatcatacttctatttgtctttctactcaccttggcgagaatatgtcttgtgtcgattgtccggaatcaagtaccctattgcagtcgttcgttagatatcgctatcttcgccacgca

SEQ ID NO: 39483 - DNA, 1089 bp, Muscodor strobelii
  misc_feature: SGI cDNA ID NO. 573739
  misc_feature: Reduced expression when VOC is produced
  misc_feature: Encodes the peptide sequence at SEQ ID NO 39484
atggcaccccaattccccaccaagaagtgcggcgtgctcggtgccactggctctgtcggccagcgcttcattcttctactgtcacaacatccccactttgttctccacgccgtcggagcctcgtcgagatcagcgggcaagaaatacaaggatgccgtccgctggaagcaggcctctcccatgggcgctgtcggagagctcgtcgtgaaggattgcaaggctcgcgagtttgccgactgtgatgtcgtcttcagtggactggactcggatgtcgccggcgacgtggagatggaattcctcaaagccaacctcgccgtcttctccaacgcaaagaactaccgccgcgaccccctcgtccccctcgtcgtcccgaccgtcaacctgccacatctcgatctcatcccccaccagcgcaaacaccacggcctcgacaagggcttcctagtctgcaactccaactgcgccgtcatcggcctcgtcatccccttcgcagcgctacaagctcgcttcggtcccgtcgacaccgtcagcgtcgtcaccatgcaggctgtgtccggtgccggctaccctggcgtcagcagtatggacatcatggacaacgtcgttcccttcatcagtggcgaggaagacaagctcgagaccgaggcacgcaagattcttggcggtatcaatggtgatgctacggcgttcgtcgagcaggacgagctccgcgtctcggctgcctgcaacagagtgccagttctcgacgggcataccgcatgtgtgtctctgcggttcaagaacagaccacctccgaaagagggggacgtccgagctgcattgggggaatatgtgtcggaagctcagaagctgggatgcccgagtgcgccagaaccgagtatcatggtcttcgatgaacctgatcggccacagcccagactggaccgcgatttgagccgtgggtatacggtcagtgttggtcgtgtgagagaggacgagagtggtatcttcgacatcaagttcgttgctttgagtcataacactgtcattggtgccgctggctcctcgatactaaatgccgaagccgctgttctcaagggctacatctaa

SEQ ID NO: 39484 - protein, 362 aa, Muscodor strobelii
  misc_feature: SGI Peptide ID NO. 573739
  misc_feature (9)..(134): Pfam Id: PF01118 Pfam Desc: Semialdehyde dehydrogenase, NAD binding domain
  misc_feature (163)..(343): Pfam Id: PF02774 Pfam Desc: Semialdehyde dehydrogenase, dimerisation domain
  misc_feature (1)..(362): NCBI GI: 145609698 Blast Desc: MGG_03051 [Magnaporthe grisea 70-15] gi|145017100|gb|EDK01463.1| MGG_03051 [Magnaporthe grisea 70-15]
  misc_feature (1)..(362): NCBI GI: 149210747 Blast Desc: MGCH7_ch7g846 [Magnaporthe grisea 70-15] gi|86196801|gb|EAQ71439.1| MGCH7_ch7g846 [Magnaporthe grisea 70-15]
  misc_feature (1)..(362): NCBI GI: 256733483 Blast Desc: [Nectria haematococca mpVI 77-13-4]
  misc_feature (1)..(362): NCBI GI: 46128241 Blast Desc: FG08498.1 [Gibberella zeae PH-1]
  misc_feature (1)..(362): NCBI GI: 156035915 Blast Desc: SS1G_13162 [Sclerotinia sclerotiorum 1980] gi|154698566|gb|EDN98304.1| SS1G_13162 [Sclerotinia sclerotiorum 1980]
  misc_feature (4)..(362): NCBI GI: 116193045 Blast Desc: conserved [Chaetomium globosum CBS 148.51] gi|88182153|gb|EAQ89621.1| conserved [Chaetomium globosum CBS 148.51]
  misc_feature (4)..(362): NCBI GI: 85114558 Blast Desc: aspartate-semialdehyde dehydrogenase [Neurospora crassa OR74A] gi|28926507|gb|EAA35479.1| aspartate-semialdehyde dehydrogenase [Neurospora crassa OR74A]
  misc_feature (1)..(362): NCBI GI: 154290542 Blast Desc: aspartate semialdehyde dehydrogenase [Botryotinia fuckeliana B05.10] gi|150847510|gb|EDN22703.1| aspartate semialdehyde dehydrogenase [Botryotinia fuckeliana B05.10]
  misc_feature (4)..(362): NCBI GI: 171683987 Blast Desc: protein product [Podospora anserina] gi|170941954|emb|CAP67606.1| protein product [Podospora anserina]
  misc_feature (4)..(361): NCBI GI: 189202028 Blast Desc: aspartate-semialdehyde dehydrogenase [Pyrenophora tritici-repentis Pt-1C-BFP] gi|187984449|gb|EDU49937.1| aspartate-semialdehyde dehydrogenase [Pyrenophora Pt-1C-BFP]
  misc_feature (8)..(362): SWISSPROT Homolog: EC 1.2.1.11 Aspartate-semialdehyde dehydrogenase
  misc_feature: Useful for introducing or modulating the production of volatile compounds
MAPQFPTKKCGVLGATGSVGQRFILLLSQHPHFVLHAVGASSRSAGKKYKDAVRWKQASPMGAVGELVVKDCKAREFADCDVVFSGLDSDVAGDVEMEFLKANLAVFSNAKNYRRDPLVPLVVPTVNLPHLDLIPHQRKHHGLDKGFLVCNSNCAVIGLVIPFAALQARFGPVDTVSVVTMQAVSGAGYPGVSSMDIMDNVVPFISGEEDKLETEARKILGGINGDATAFVEQDELRVSAACNRVPVLDGHTACVSLRFKNRPPPKEGDVRAALGEYVSEAQKLGCPSAPEPSIMVFDEPDRPQPRLDRDLSRGYTVSVGRVREDESGIFDIKFVALSHNTVIGAAGSSILNAEAAVLKGYI

SEQ ID NO: 39485 - DNA, 5138 bp, Muscodor strobelii
  misc_feature: SGI EST ID NO. CUFF.95387.4
  misc_feature: Variant of the nucleotide sequence at SEQ ID NO 39483
gaataatattaccttaatcttaaatcgatgccgctgatgaatgctgagatgccgcgggcaggtgaacgactggaggctttgaaggaaggtgtaaaacggcgacggcggcgtttgatccgatagcggattggcggggcatgacacagcgaccgcggggttaacatttttgttggccaagaaagatcctggggttgacgttgacgcgccgacgagattaaaattgcgacaataagacttgttctacgtcaactggactatttggacacagcacagctcaattgatcctcacagcaaccatggcaccccaattccccaccaagaagtgcggcgtgctcggtgccactggctctgtcggccagcgcttcattcttctactgtcacaacatccccactttgttctccacgccgtcggagcctcgtcgagatcagcgggcaagaaatacaaggatgccgtccgctggaagcaggcctctcccatgggcgctgtcggagagctcgtcgtgaaggattgcaaggctcgcgagtttgccgactgtgatgtcgtcttcagtggactggactcggatgtcgccggcgacgtggagatggaattcctcaaagccaacctcgccgtcttctccaacgcaaagaactaccgccgcgaccccctcgtccccctcgtcgtcccgaccgtcaacctgccacatctcgatctcatcccccaccagcgcaaacaccacggcctcgacaagggcttcctagtctgcaactccaactgcgccgtcatcggcctcgtcatccccttcgcagcgctacaagctcgcttcggtcccgtcgacaccgtcagcgtcgtcaccatgcaggctgtgtccggtgccggctaccctggcgtcagcagtatggacatcatggacaacgtcgttcccttcatcagtggcgaggaagacaagctcgagaccgaggcacgcaagattcttggcggtatcaatggtgatgctacggcgttcgtcgagcaggacgagctccgcgtctcggctgcctgcaacagagtgccagttctcgacgggcataccgcatgtgtgtctctgcggttcaagaacagaccacctccgaaagagggggacgtccgagctgcattgggggaatatgtgtcggaagctcagaagctgggatgcccgagtgcgccagaaccgagtatcatggtcttcgatgaacctgatcggccacagcccagactggaccgcgatttgagccgtgggtatacggtcagtgttggtcgtgtgagagaggacgagagtggtatcttcgacatcaagttcgttgctttgagtcataacactgtcattggtgccgctggctcctcgatactaaatgccgaagccgctgttctcaagggctacatctaagcatatgcatgcatgtaatggcgctaggtccgttgcaacgcttgtcgacactctttgctttcccggacactgactcgaacctaggtattcggagagtgaaaagtcataaacattatgtagggaaggaaagagaacttctgcgtaaataactttcacgatttcgaacttgtaaaacatcactcctatgtttccagatatcttatgaaatctgttcgcgcaactgtggcacgtctttgtcgtgatgctactgacccgccacacgcccagcgccaacatcgtcagctgcccttattagtacttcgtggcaagccaccagttccgatgacgtgttacacgacggcttgcactgcagtggtgtcggaaaggtatgcgaccaatagcgaaactatggcattccgacgtaagacagcgcgcaaagtatttcctgcatcttgtgctgccccagtgcaagggcatccgcgctactatattcggcaactgtggccagtggctgcatggcatgcatggtgatcgtggagggaagctagggtgtgtttgttcggctcgggtcggacgcccgatcctctgccatcccgctttcacgccactttggatgcgacctcgtttggggttatctttattggaaaggttgctgtccgtgttgtcttctcgagcgcatctcttcaatttcctcgtcaacgtgaatagttcgattgccatgattcgctttttgtgattgagtatggagatccagaattgataacggcggtttccgcccacggcatccgaagcgccaagagtcagtgacctatctatgccgcagtagttgcgggcaggctcgcaaggacttgcccgttgcagcctaggatcaactaattgttggggaatcgatgatatacaccacttgacaatcagcaaccacccgcatattgacgccgtgttcgacatcctcttacctgatttggggattcggggctggccaaggaagacgcatagtcggggtgatgataagcacgcccgcgatataggaggctcttcatttccatttaatttattaaacgtcagacatctggccgtttcacaggttaccacgttgttccaattgagttttaggtttaggattgggcatctcccctctcttcccttaattccgacaccaacgaagtataacagacaagacattcaccccttcaacttctcctgacggaacgtctcactcctgtttgtgaccttgaaatgatgtctaagacacagtctagggcacacccgctgcggccactgtcacaagatgagctactgcgcgcccgcaatctagtcatcgacaagcacagtggggacggcatcggctgtgtgttcagatctgcctactttgatgagcccaagagggaagagctcacgcagtacctcgccgctgagcatgcaggcgaaaaatcatcaactacacctacaagacgcgtgaagttgttatacgacgtcgtccagaatggcgtattccaactcaccgaggcgattgtggatgtggaggcagggcagatctacgccagcaaagagttcgcgcctaggtaccagaccagctacactatgccggaatttgctatgttccaagatgcatgtgtgtcatctgacatgttcaaagaggccatggaggaattcgaattgcccgagaacttcaagatcactattgatccttggccgtatggcggtcttgacccggaagaggacctgccccggtacatgcagggactcgtttttgctcgcaacacgacgagcaataatgatgattcaaaccactatgcttaccctgtgcccatcatacccgtgatggatgtagccactaagaagctgatccgaattgaccgcttggcaacgggcggatctagcgacgggcttgcaccgcagccacgcggcgacaagcccaagaagctcttccagacggctacatctgctgaatatgtgcctgagctgcttgatagaccgctgcgaacagatatcaagcccatcaatgtcacccaacccgaaggtgcctcgttcaaagtcgactccgagaatctcgtcgagtggcagaagtggcgattccgcattgggttcacgccgagagagggcgcggttctatacgacgtatgctatgacaatcgctcgatcttacatcgcctttcattctccgagatgacagtaccatacggcgacccacgtccgccgttccaccgcaaacaggccttcgactttggagatggtgggattggccgtgctgctaataacctgaaactaggttgtgattgtctcggcgctatccactacctcagcgccgttgttgccggtactgacgggaagccggagacggctaagaatgttgtttgtctgcatgaacaggataacggcattggttggaaacacaccaacttccgcacagaccgcgccgtcgtaacgcgacttcgggaattcgtcattcaatttgttgccacgctcgcaaactacgagtacgtattcgcgtataagcttgacacagcaggaggtatcacagtcgagacacgggccactggtattgtcagcgtcgtaggtatagacgaaggcaagacctccggctacggaaacgttgtcgcgccgggcatcctagcacagaatcaccagcatatcttcgctgtgcggattgatccctctatcgattcctacaatcctgaagagacttccattgtccttgaggaaactcacggcatccccatgaatccagagactaatcctttcggaaacgggtatgaaattcgaaggacggtggtagagaaggcgatgttcacagatgcggaaccgaaattcaacaggaccgtcaaaatggaaaatagcaaaaagaagaatcccatcagcgggaagaacgtatcatatatgttctcacctcccgcaacacaactcttgctcgcggacgagaatagtactcaagctgcaagagctccgtatgcgcgacatcacgtctgggtcacgggacatcggaatgaggagctttgggccgccggggagtttactaatcaaagcaagaaagaggaaggaggcgtgaaagatatggttgcaaggggtgattggttcgtcgatagccttgagagtgagggtgagggcaagagaagcagtcctgtagtgtggaatgtgtttggacttacgcataatcccagggtggaggattggcccgttatgcccgtggagatccaccaattccatatccgacccgcagactttttcacgtctaaccctgcgcttgacattcctggcacgaaaaacgaatcctccgtcctggtctcatgctgtggcaagccaaccgccgcctcttctgaggatggtctgaagactgatagcgatgcggcttcagatgccgtggctcatctccagggtacgacggatgttgatcccaaggatttgggtagtaagggcgccagtaaggacggggaagcgaaggatggcaaggatggcaggagattgtccactacacttaaggggatctttgggttgaagaaatgaagtcatggctgatgggcctccgatagttatctcctcagagtgtgaaaggtactgctagagagaaaggaatgccatatgccaatgctttgaaatgatgttcaaagtgacagatatggtttctgagatgacatgcatagggcatagtaatgatcatgacgatatttcgcgaatttaatgaagcgagattctttgcgcgacctgtagtcggtcaactcggttgttcgagacactcattggaccttgatagcggccctgcttgtgatcagccattcg

SEQ ID NO: 39486 - DNA, 2265 bp, Muscodor strobelii
  misc_feature: SGI cDNA ID NO. 573740
  misc_feature: Encodes the peptide sequence at SEQ ID NO 39487
atgatgtctaagacacagtctagggcacacccgctgcggccactgtcacaagatgagctactgcgcgcccgcaatctagtcatcgacaagcacagtggggacggcatcggctgtgtgttcagatctgcctactttgatgagcccaagagggaagagctcacgcagtacctcgccgctgagcatgcaggcgaaaaatcatcaactacacctacaagacgcgtgaagttgttatacgacgtcgtccagaatggcgtattccaactcaccgaggcgattgtggatgtggaggcagggcagatctacgccagcaaagagttcgcgcctaggtaccagaccagctacactatgccggaatttgctatgttccaagatgcatgtgtgtcatctgacatgttcaaagaggccatggaggaattcgaattgcccgagaacttcaagatcactattgatccttggccgtatggcggtcttgacccggaagaggacctgccccggtacatgcagggactcgtttttgctcgcaacacgacgagcaataatgatgattcaaaccactatgcttaccctgtgcccatcatacccgtgatggatgtagccactaagaagctgatccgaattgaccgcttggcaacgggcggatctagcgacgggcttgcaccgcagccacgcggcgacaagcccaagaagctcttccagacggctacatctgctgaatatgtgcctgagctgcttgatagaccgctgcgaacagatatcaagcccatcaatgtcacccaacccgaaggtgcctcgttcaaagtcgactccgagaatctcgtcgagtggcagaagtggcgattccgcattgggttcacgccgagagagggcgcggttctatacgacgtatgctatgacaatcgctcgatcttacatcgcctttcattctccgagatgacagtaccatacggcgacccacgtccgccgttccaccgcaaacaggccttcgactttggagatggtgggattggccgtgctgctaataacctgaaactaggttgtgattgtctcggcgctatccactacctcagcgccgttgttgccggtactgacgggaagccggagacggctaagaatgttgtttgtctgcatgaacaggataacggcattggttggaaacacaccaacttccgcacagaccgcgccgtcgtaacgcgacttcgggaattcgtcattcaatttgttgccacgctcgcaaactacgagtacgtattcgcgtataagcttgacacagcaggaggtatcacagtcgagacacgggccactggtattgtcagcgtcgtaggtatagacgaaggcaagacctccggctacggaaacgttgtcgcgccgggcatcctagcacagaatcaccagcatatcttcgctgtgcggattgatccctctatcgattcctacaatcctgaagagacttccattgtccttgaggaaactcacggcatccccatgaatccagagactaatcctttcggaaacgggtatgaaattcgaaggacggtggtagagaaggcgatgttcacagatgcggaaccgaaattcaacaggaccgtcaaaatggaaaatagcaaaaagaagaatcccatcagcgggaagaacgtatcatatatgttctcacctcccgcaacacaactcttgctcgcggacgagaatagtactcaagctgcaagagctccgtatgcgcgacatcacgtctgggtcacgggacatcggaatgaggagctttgggccgccggggagtttactaatcaaagcaagaaagaggaaggaggcgtgaaagatatggttgcaaggggtgattggttcgtcgatagccttgagagtgagggtgagggcaagagaagcagtcctgtagtgtggaatgtgtttggacttacgcataatcccagggtggaggattggcccgttatgcccgtggagatccaccaattccatatccgacccgcagactttttcacgtctaaccctgcgcttgacattcctggcacgaaaaacgaatcctccgtcctggtctcatgctgtggcaagccaaccgccgcctcttctgaggatggtctgaagactgatagcgatgcggcttcagatgccgtggctcatctccagggtacgacggatgttgatcccaaggatttgggtagtaagggcgccagtaaggacggggaagcgaaggatggcaaggatggcaggagattgtccactacacttaaggggatctttgggttgaagaaatga

SEQ ID NO: 39487 - protein, 754 aa, Muscodor strobelii
  misc_feature: SGI Peptide ID NO. 573740
  misc_feature (250)..(676): Pfam Id: PF01179 Pfam Desc: Copper amine oxidase, enzyme domain
  misc_feature (10)..(106): Pfam Id: PF02727 Pfam Desc: Copper amine oxidase, N2 domain
  misc_feature (250)..(601): Pfam Id: PF01179 Pfam Desc: Copper amine oxidase, enzyme domain
  misc_feature (629)..(676): Pfam Id: PF01179 Pfam Desc: Copper amine oxidase, enzyme domain
  misc_feature (10)..(685): NCBI GI: 261353813 Blast Desc: copper amine oxidase [Verticillium albo-atrum VaMs.102]
  misc_feature (10)..(721): NCBI GI: 239608261 Blast Desc: copper amine oxidase 1 [Ajellomyces dermatitidis ER-3]
  misc_feature (10)..(721): NCBI GI: 261203419 Blast Desc: copper amine oxidase 1 [Ajellomyces dermatitidis SLH14081] gi|239586708|gb|EEQ69351.1| copper amine oxidase 1 [Ajellomyces dermatitidis SLH14081]
  misc_feature (10)..(685): NCBI GI: 226286930 Blast Desc: copper amine oxidase [Paracoccidioides brasiliensis Pb18]
  misc_feature (10)..(685): NCBI GI: 225683325 Blast Desc: copper amine oxidase [Paracoccidioides brasiliensis Pb03]
  misc_feature (7)..(685): NCBI GI: 240278865 Blast Desc: copper amine oxidase [Ajellomyces capsulatus H143]
  misc_feature (7)..(685): NCBI GI: 225560117 Blast Desc: copper amine oxidase [Ajellomyces capsulatus G186AR]
  misc_feature (7)..(702): NCBI GI: 154288044 Blast Desc: copper amine oxidase 1 [Ajellomyces capsulatus NAm1] gi|150408458|gb|EDN03999.1| copper amine oxidase 1 [Ajellomyces capsulatus NAm1]
  misc_feature (47)..(685): NCBI GI: 226283823 Blast Desc: copper amine oxidase [Paracoccidioides brasiliensis Pb01]
  misc_feature (9)..(689): NCBI GI: 212536298 Blast Desc: copper amine oxidase, [Penicillium marneffei ATCC 18224] gi|210070704|gb|EEA24794.1| copper amine oxidase, [Penicillium marneffei ATCC 18224]
  misc_feature (10)..(685): SWISSPROT Homolog: EC 1.4.3.22 Diamine oxidase
MMSKTQSRAHPLRPLSQDELLRARNLVIDKHSGDGIGCVFRSAYFDEPKREELTQYLAAEHAGEKSSTTPTRRVKLLYDVVQNGVFQLTEAIVDVEAGQIYASKEFAPRYQTSYTMPEFAMFQDACVSSDMFKEAMEEFELPENFKITIDPWPYGGLDPEEDLPRYMQGLVFARNTTSNNDDSNHYAYPVPIIPVMDVATKKLIRIDRLATGGSSDGLAPQPRGDKPKKLFQTATSAEYVPELLDRPLRTDIKPINVTQPEGASFKVDSENLVEWQKWRFRIGFTPREGAVLYDVCYDNRSILHRLSFSEMTVPYGDPRPPFHRKQAFDFGDGGIGRAANNLKLGCDCLGAIHYLSAVVAGTDGKPETAKNVVCLHEQDNGIGWKHTNFRTDRAVVTRLREFVIQFVATLANYEYVFAYKLDTAGGITVETRATGIVSVVGIDEGKTSGYGNVVAPGILAQNHQHIFAVRIDPSIDSYNPEETSIVLEETHGIPMNPETNPFGNGYEIRRTVVEKAMFTDAEPKFNRTVKMENSKKKNPISGKNVSYMFSPPATQLLLADENSTQAARAPYARHHVWVTGHRNEELWAAGEFTNQSKKEEGGVKDMVARGDWFVDSLESEGEGKRSSPVVWNVFGLTHNPRVEDWPVMPVEIHQFHIRPADFFTSNPALDIPGTKNESSVLVSCCGKPTAASSEDGLKTDSDAASDAVAHLQGTTDVDPKDLGSKGASKDGEAKDGKDGRRLSTTLKGIFGLKK

SEQ ID NO: 39488 - DNA, 5138 bp, Muscodor strobelii; identical to SEQ ID NO: 39485
  misc_feature: SGI EST ID NO. CUFF.95387.4
  misc_feature: Variant of the nucleotide sequence at SEQ ID NO 39486

SEQ ID NO: 39489 - DNA, 1497 bp, Muscodor strobelii
  misc_feature: SGI cDNA ID NO. 573741
  misc_feature: Encodes the peptide sequence at SEQ ID NO 39490
atgtttaacgccagtcttgacgctccggggatcccatatacaactttgtcttatacttggcagaccaaattggacgagaacgatgattacgccaatggcacgcgcgaacacgaattaattctagtcaatgaccaagataaactcattcacaagaaccttgccgatgcgttgcgctgcatccgtggggaatcgccgcagtgcgtttgggccgatgctctgtgtatagaccaatccaaccttgctgagcgcagcttgcaggtgacgaaaatgcgacacatcttttctcaagctaccaccgtttgggcgtggcttggacaggagaataagagtagtaatcttgccatggacttccttgcagaccttgcacaacgttccgaagacgggaatgttggggactggttcagtaacacggcatttcaaccatcatactaccctgtttggcaggcactacgagacctgttggatcgtaactggtggaggcgcgcgtggattgtgcaggaattcgccctaccctcaaatgtgacctttctatgcggtgaccgccagctttcaaccaaggatttcgaggctgcagatcggctcatatttgaacatctcagtaccgcaatgcatcaggaggtagccgtgatgaaacggttcgtgcggataagtggaaaccattttgatattgtaagaaacttatttgatgtacgccgacgcctgcaagctggagaacatattgccgccctagcaagccttcaaatgacaaggcaagctcaggcgacagacccaagagactacttgttcgccaagttgggtctcagtgacagcgagctgacagagatgtgctctccagattatgaattgagagcggaagatatatggttcaacttcttgtcgaaatacatatcgcgaaagaaagacctctatattatatgccttgcaggaatgccaccacgagcgaatcctcatttgccttcgtggctcccggattggggccctgagaagcccatataccctatatgctcgtttggcaggggcgaaaatccgcagtggccatatttcgatgcagcttgctgtacagaagcagatgctagtatatcgactcataggctccagcccgatagtgctctgaagtgtcgaggtctgtacactgacatcgttgacggcgttgccggtgaccgttgggctccccaaaagcctcaaaggcgccaatcaaagtcccgcaagaacgtttataagacgcgagtcggcgccttccgagctctatacagaacaataacctgcaacacggatcgaactggggattggagccctgcccccgaagaactcggtactattctcgccgaacggtggcgacaactagaggaagtggtcgcatcatacgaccttgaccggagccaggcacttccgcctgaattaacaagtagtggttcgggttttgagaaaagatggcgtagcatgcgtagtctaaagctcggcgggtgcctttgcgttctattgccgcggccggtctga

SEQ ID NO: 39490 - protein, 498 aa, Muscodor strobelii
  misc_feature: SGI Peptide ID NO. 573741
  misc_feature (13)..(167): Pfam Id: PF06985 Pfam Desc: Heterokaryon incompatibility protein (HET)
  misc_feature (1)..(385): NCBI GI: 119179507 Blast Desc: CIMG_08498 [Coccidioides immitis RS]
  misc_feature (3)..(394): NCBI GI: 39975543 Blast Desc: MGG_00082 [Magnaporthe grisea 70-15] gi|145019080|gb|EDK03359.1| MGG_00082 [Magnaporthe grisea 70-15]
  misc_feature (1)..(385): NCBI GI: 240110131 Blast Desc: Heterokaryon incompatibility protein, [Coccidioides posadasii C735 delta SOWgp]
  misc_feature (13)..(325): NCBI GI: 256731898 Blast Desc: NECHADRAFT_80737 [Nectria haematococca mpVI 77-13-4]
  misc_feature (13)..(418): NCBI GI: 256722665 Blast Desc: NECHADRAFT_87188 [Nectria haematococca mpVI 77-13-4]
  misc_feature (6)..(388): NCBI GI: 256726694 Blast Desc: NECHADRAFT_99083 [Nectria haematococca mpVI 77-13-4]
  misc_feature (49)..(325): NCBI GI: 171686082 Blast Desc: protein product [Podospora anserina] gi|170943002|emb|CAP68655.1| protein product [Podospora anserina]
  misc_feature (13)..(483): NCBI GI: 189206171 Blast Desc: conserved [Pyrenophora tritici-repentis Pt-1C-BFP] gi|187975513|gb|EDU42139.1| conserved [Pyrenophora tritici-repentis Pt-1C-BFP]
  misc_feature (13)..(325): NCBI GI: 256724619 Blast Desc: NECHADRAFT_95927 [Nectria haematococca mpVI 77-13-4]
  misc_feature (13)..(345): NCBI GI: 39974569 Blast Desc: MGG_00569 [Magnaporthe grisea 70-15] gi|145018530|gb|EDK02809.1| MGG_00569 [Magnaporthe grisea 70-15]
MFNASLDAPGIPYTTLSYTWQTKLDENDDYANGTREHELILVNDQDKLIHKNLADALRCIRGESPQCVWADALCIDQSNLAERSLQVTKMRHIFSQATTVWAWLGQENKSSNLAMDFLADLAQRSEDGNVGDWFSNTAFQPSYYPVWQALRDLLDRNWWRRAWIVQEFALPSNVTFLCGDRQLSTKDFEAADRLIFEHLSTAMHQEVAVMKRFVRISGNHFDIVRNLFDVRRRLQAGEHIAALASLQMTRQAQATDPRDYLFAKLGLSDSELTEMCSPDYELRAEDIWFNFLSKYISRKKDLYIICLAGMPPRANPHLPSWLPDWGPEKPIYPICSFGRGENPQWPYFDAACCTEADASISTHRLQPDSALKCRGLYTDIVDGVAGDRWAPQKPQRRQSKSRKNVYKTRVGAFRALYRTITCNTDRTGDWSPAPEELGTILAERWRQLEEVVASYDLDRSQALPPELTSSGSGFEKRWRSMRSLKLGGCLCVLLPRPV

SEQ ID NO: 39491 - DNA, 401 bp, Muscodor strobelii
  misc_feature: SGI EST ID NO. CUFF.95086.0
  misc_feature: Variant of the nucleotide sequence at SEQ ID NO 39489
cctcatttgccttcgtggctcccggattggggccctgagaagcccatataccctatatgctcgtttggcaggggcgaaaatccgcagtggccatatttcgatgcagcttgctgtacagaagcagatgctagtatatcgactcataggctccagcccgatagtgctctgaagtgtcgaggtctgtacactgacatcgttgacggcgttgccggtgaccgttgggctccccaaaagcctcaaaggcgccaatcaaagtcccgcaagaacgtttataagacgcgagtcggcgccttccgagctctatacagaacaataacctgcaacacggatcgaactggggattggagccctgcccccgaagaactcggtactattctcgccgaacggtggcgacaactaga

SEQ ID NO: 39492 - DNA, 618 bp, Muscodor strobelii
  misc_feature: SGI cDNA ID NO. 573742
  misc_feature: Encodes the peptide sequence at SEQ ID NO 39493
atgatcaatgagccctatttcgatacgaagaagaagctaagtcacgatcatataataaatgtcaaacccttcgaccctgaggatggtgtggacatcgtctttggtggtacgatcgttggccaggccattaccgcagcttatgcaactgtcccgtccggtttcgacgtctattcttcccagtcctcattcctgcgaccagcaagctttgagaaaaacatggtgtattgcgctaaaattccccatatggagggaatgagacctaaagacgtagatagcactgcactttccaagaacttgagtgctgctggtgcgacgctcgggaaaatatctccagacgagccgttcgaatggcgccccgcggcagtcaaggctgtcgaagaaggagatgatgctacatgctatcgaggccgagggttcttccgctcccgaagtcctttgcttcgtaagtccgccaacttagctgctttagcatatgcatcggacaagttcttcgtagggacggccctcaatgcgaatcccagcgaagtgggcgagcgagtgcgtaatgtgtcaatggcagcaactctaagttacagcgtgtggttccatgaccctcaagttcgcgttgaggactggtaa

SEQ ID NO: 39493 - protein, 205 aa, Muscodor strobelii
  misc_feature: SGI Peptide ID NO. 573742
  misc_feature (29)..(198): NCBI GI: 114772502 Blast Desc: Acyl-CoA thioesterase II [alpha proteobacterium HTCC2255] gi|221134601|ref|ZP_03560904.1| palmitoyl-CoA hydrolase [Glaciecola sp. HTCC2999]
  misc_feature (29)..(205): NCBI GI: 238754251 Blast Desc: Acyl-CoA thioesterase II [Yersinia ruckeri ATCC 29473] gi|238707498|gb|EEP99858.1| Acyl-CoA thioesterase II [Yersinia ruckeri ATCC 29473]
  misc_feature (16)..(205): NCBI GI: 255947972 Blast Desc: Pc22g07280 [Penicillium chrysogenum Wisconsin 54-1255] gi|211591770|emb|CAP98016.1| Pc22g07280 [Penicillium chrysogenum Wisconsin 54-1255]
  misc_feature (20)..(205): NCBI GI: 39976215 Blast Desc: MGG_05966 [Magnaporthe grisea 70-15] gi|145011762|gb|EDJ96418.1| MGG_05966 [Magnaporthe grisea 70-15]
  misc_feature (29)..(205): NCBI GI: 238751025 Blast Desc: Acyl-CoA thioesterase II [Yersinia rohdei ATCC 43380] gi|238710715|gb|EEQ02937.1| Acyl-CoA thioesterase II [Yersinia rohdei ATCC 43380]
  misc_feature (29)..(205): NCBI GI: 157369354 Blast Desc: acyl-CoA thioesterase II [Serratia proteamaculans 568] gi|157321118|gb|ABV40215.1| acyl-CoA thioesterase II [Serratia proteamaculans 568]
  misc_feature (37)..(205): NCBI GI: 146324791 Blast Desc: acyl-CoA thioesterase [Aspergillus fumigatus Af293] gi|129556156|gb|EAL85430.2| acyl-CoA thioesterase, [Aspergillus fumigatus Af293] gi|159123553|gb|EDP48672.1| acyl-CoA fumigatus
  misc_feature (29)..(205): NCBI GI: 149925138 Blast Desc: Acyl-CoA thioesterase II [Plesiocystis pacifica SIR-1] gi|149813988|gb|EDM73627.1| Acyl-CoA thioesterase II [Plesiocystis pacifica SIR-1]
  misc_feature (29)..(205): NCBI GI: 238795526 Blast Desc: Acyl-CoA thioesterase II [Yersinia mollaretii ATCC 43969] gi|238720645|gb|EEQ12446.1| Acyl-CoA thioesterase II [Yersinia mollaretii ATCC 43969]
  misc_feature (29)..(205): NCBI GI: 238783593 Blast Desc: Acyl-CoA thioesterase II [Yersinia bercovieri ATCC 43970] gi|238715471|gb|EEQ07462.1| Acyl-CoA thioesterase II [Yersinia bercovieri ATCC 43970]
MINEPYFDTKKKLSHDHIINVKPFDPEDGVDIVFGGTIVGQAITAAYATVPSGFDVYSSQSSFLRPASFEKNMVYCAKIPHMEGMRPKDVDSTALSKNLSAAGATLGKISPDEPFEWRPAAVKAVEEGDDATCYRGRGFFRSRSPLLRKSANLAALAYASDKFFVGTALNANPSEVGERVRNVSMAATLSYSVWFHDPQVRVEDW

SEQ ID NO: 39494 - DNA, 357 bp, Muscodor strobelii
  misc_feature: SGI cDNA ID NO. 573744
  misc_feature: Encodes the peptide sequence at SEQ ID NO 39495
atggaagacctgggcttctccgcctccgaattagatgacattgagcgacaggctaattccgacggtattttcggccccggcaccgaagcgcacgacgccttcgatctatccgtcgaggagaccttgcgccaacatagccagtcattgtatagttcttctcactgccgaggcacaacaccgaggcacaacagaaggtcctcgctgcttcatagctcgaataccgcaagaacaatcaggagcatggccgctgggtttcttcggaggtctaatctagagttatcggccgcccgcaagataaagattgctaaggtcctcgtgcctttcatcatgatctggcgtgctgatagccgtggctag

SEQ ID NO: 39495 - protein, 118 aa, Muscodor strobelii
  misc_feature: SGI Peptide ID NO. 573744
MEDLGFSASELDDIERQANSDGIFGPGTEAHDAFDLSVEETLRQHSQSLYSSSHCRGTTPRHNRRSSLLHSSNTARTIRSMAAGFLRRSNLELSAARKIKIAKVLVPFIMIWRADSRG

SEQ ID NO: 39496 - DNA, 1029 bp, Muscodor strobelii
  misc_feature: SGI cDNA ID NO. 573745
  misc_feature: Encodes the peptide sequence at SEQ ID NO 39497
atggctacgttcgtgagctcaatgatcccgccaaccggggaatctggtaaccccgggaacacgatagcagtctctacccagtcagacgaggaagatacccaagaaagtgattctgatgctgatttgtcatccgtcaaccttgctacagagtccaatggcaagccaaatcgcgcaaggaaacggtcacgcgaacttgatctgctaaacagtggccctcaaggaattgattcctcaaaacggtcgtggcgcggtagtggatctctagcgagccaatcctccacaagtaccaggagcttacggccattgttatctcgcgtgcgaacacgagagacagtgccaccttctactcagaaatgctccaggaacaaagtaacgagacagtgcgccaccgtcagcagacatcaaagtcgagagcaatcagcaacgcgtcaggatgggaatcatgctctggggggtactgagtggcttggccatataccccgagtgggaggcagcgaccataagactaccaacttggagcatcttatgttgaagtgtggctcctgcggctactcgcccgagcacattatccagtttgcaaataccgttcaagctctccacaacgtgcagaacagcaggcatttattagatctgttcctcggattcgttcgtgacgatgccacgcggagacttggcgagactagaccgatggcagatcggagtccctcgaagatcttgacttgtagcgaggcttatagttttcccgacactgtttcttcggctgatggccatgacgggaccatggttgacacgtgggatggggtcagtgagagtgacgttggaagcctttctgaagccgattctgtaggcagcatagatgaaggccccaaaaacagcaaacgagcacaacgacgacctcggtggacaccactggacgatgcgcggcttcgtgtgtgggtcaaggaaggaatggggttttcggtgatcgcaaaaaatttacagcgtagtgaaggggctgtctcacagcgttggagaatcttgaacggctaa

SEQ ID NO: 39497 - protein, 342 aa, Muscodor strobelii
  misc_feature: SGI Peptide ID NO. 573745
MATFVSSMIPPTGESGNPGNTIAVSTQSDEEDTQESDSDADLSSVNLATESNGKPNRARKRSRELDLLNSGPQGIDSSKRSWRGSGSLASQSSTSTRSLRPLLSRVRTRETVPPSTQKCSRNKVTRQCATVSRHQSREQSATRQDGNHALGGTEWLGHIPRVGGSDHKTTNLEHLMLKCGSCGYSPEHIIQFANTVQALHNVQNSRHLLDLFLGFVRDDATRRLGETRPMADRSPSKILTCSEAYSFPDTVSSADGHDGTMVDTWDGVSESDVGSLSEADSVGSIDEGPKNSKRAQRRPRWTPLDDARLRVWVKEGMGFSVIAKNLQRSEGAVSQRWRILNG

SEQ ID NO: 39498 - DNA, 1808 bp, Muscodor strobelii
  misc_feature: SGI EST ID NO. CUFF.95125.0
  misc_feature: Variant of the nucleotide sequence at SEQ ID NO 39496
ctggccaacgcgtcttgtctgtcgcgacgccggcctctagcccagattatgtagaagaatctgcacacgattctaaggccgagccccaaccatctacgaatgcctttgtcagcctttcttcgggttcaattgtctgcccctacgcagtccctctttcgtttccttcagaacagcagctagagaatgagactggttctcgaacagcattgactagccagatttctaatccggtcattgagtgtgccatagacgtggaggagaggcggcctcaacctaaggtgtcgcatttcgagactgaggaacagcccctcactgcgctcgccgacagaaatgtctctcttcgtcaccaattaacgggaaagcaaacggaagcaagaaacagccccacaatggctacgttcgtgagctcaatgatcccgccaaccggggaatctggtaaccccgggaacacgatagcagtctctacccagtcagacgaggaagatacccaagaaagtgattctgatgctgatttgtcatccgtcaaccttgctacagagtccaatggcaagccaaatcgcgcaaggaaacggtcacgcgaacttgatctgctaaacagtggccctcaaggaattgattcctcaaaacggtcgtggcgcggtagtggatctctagcgagccaatcctccacaagtaccaggagcttacggccattgttatctcgcgtgcgaacacgagagacagtgccaccttctactcagaaatgctccaggaacaaagtaacgagacagtgcgccaccgtcagcagacatcaaagtcgagagcaatcagcaacgcgtcaggatgggaatcatgctctggggggtactgagtggcttggccatataccccgagtgggaggcagcgaccataagactaccaacttggagcatcttatgttgaagtgtggctcctgcggctactcgcccgagcacattatccagtttgcaaataccgttcaagctctccacaacgtgcagaacagcaggcatttattagatctgttcctcggattcgttcgtgacgatgccacgcggagacttggcgagactagaccgatggcagatcggagtccctcgaagatcttgacttgtagcgaggcttatagttttcccgacactgtttcttcggctgatggccatgacgggaccatggttgacacgtgggatggggtcagtgagagtgacgttggaagcctttctgaagccgattctgtaggcagcatagatgaaggccccaaaaacagcaaacgagcacaacgacgacctcggtggacaccactggacgatgcgcggcttcgtgtgtgggtcaaggaaggaatggggttttcggtgatcgcaaaaaatttacagcgtagtgaaggggctgtctcacagcgttggagaatcttgaacggctaaggaaaaaagtgagaatgctattggcgagttggtttttagacagttagtgtgaacatatttttgcttatcttttccatcagccggggggaggtggattgagatatttctgttgccctgtaactggttaggatgagtttgcaaccaggcttcagcttgacgagctagtcccataattacaccgacgtcctgtgctatagactgaatgctcttgtgtgccgccaaccagctccctttcagcaccacgcgctcatccgactcatcatacctcacacacagattttacggtcggcactagtcatagtctagccacggctatcagcacgccagatcatgatgaaaggcacgaggaccttagcaatctttatcttgcgggcggccgataactctaga

SEQ ID NO: 39499 - DNA, 1944 bp, Muscodor strobelii
  misc_feature: SGI cDNA ID NO. 573746
  misc_feature: Elevated expression when VOC is produced
  misc_feature: Encodes the peptide sequence at SEQ ID NO 39500
atggcgacgccaagtgtgccaaaacgatttgctctccttgtcggagtagacttgtatctgaacgacggttcgaggcggcacaaagatgacaatgctgtatctctcacgcacttgaaaggggccttgaatgatgtcacatacattcgatcacttcttcaggatcagtttctattcgatcaactcactgtcctcactagttctccatcccagaacaaccctaatgttcctcaagagccagagaatgactggcccacacatgccaacgtcaagggggcatttgaaaatatacgcaacgaggctggtcctggcgatatcttcttcttccacttctctggacatggcgctccgttagagccggtccttgggtcgcctaacattggcagtaggaatgacctatccctgatgacagtggactactgttgcggaaaaccggcgattagaggatgggagctaaatgcatggttacgggaactccatgagaataaagttcgggtcattgtccttcttgacagttgttattctggaggggcttggcgagtcgatatccgtttccgatctcctgataactggacaccccctccaaacgtcccttctgatgaagccgctgtgcagggaacgcagaaaaagccgggccatcgcgacggagatctggatgtatgctgggatctcaatccgagggattttacgctcatgacggcttgccagaacaccgaaaaagctgccgagaaaagtgagaatgagacagtatatggcgcattcaccctcgccctcatgaaatacttccagactccatcacatcccttcaattcaacgtatcgtgcaatttgtgaccataccgctacccagatcgcatcatgggagctgtcacaaaatcctcgggtttttggtcgcgacagattggcatttcttgaagacttcgagccaatttcggcaacgccagtctttggaacgctcaacgacggtatcgtaactctccctgttggcaagattcatggtatcaacacaggatcagagtttatcacaatttcgacgagtcccagggctattgtctcggtagatgaagtctacgatctagaaagtagggcacagattttacggggttccgttcaggatccgtcacagtccgattggttcatcccgtaccggtggagctcggagaatcccttgaacattatcgtggatccgaatctagggagcttctttcagcagaagctccgcgaccacttggagactaggattactggcaacatccaatacacacagggggttgaaatgaccaagagtgaagctgctcaagctgagtggttccgactaggaatgaaagaggatggtggcattgatatcttcggacccgagcagacagtgggtgatcaaggaccagtacgtggttggaagaccagagggaaaaccgacgacgagagagcaagggacttggccattgcgctagctcacctatttcgattcgggcagattgttcaattacggaatgagtccgaggatgcagcaccatttcaaatgaccatcacatctgatactgacaagaattccaacattgatgttaattataagttccagaacaacgacaacgaggaattacgctttgcagttctcatcctcagcccagggttccacgtcaagcagttatttccggctacagacactttacaagcagtacctccgggcagaacacaatttgtcccgttttcattaacagtacctgatgagctgaaatacgacaaggcgaatgatcaacaacatgggtaccgtgatattgtccgtactgttgtaacaaagggtaagagtgtgtcgctcaagtgtacagagctgcctgatatttggaatgccgatcaatgggatagtaagaggacgaatggtttgggcagggacgggaatcttcgtgatcatttcagctggtggatacaagatgaggacttcacaaggtga

SEQ ID NO: 39500 - protein, 647 aa, Muscodor strobelii
  misc_feature: SGI Peptide ID NO. 573746
  misc_feature (9)..(297): Pfam Id: PF00656 Pfam Desc: Caspase domain
  misc_feature (9)..(114): Pfam Id: PF00656 Pfam Desc: Caspase domain
  misc_feature (7)..(577): NCBI GI: 159030615 Blast Desc: protein product [Microcystis aeruginosa PCC 7806]
  misc_feature (10)..(574): NCBI GI: 119490224 Blast Desc: Peptidase C14, caspase catalytic subunit p20 [Lyngbya sp. PCC 8106] gi|119454110|gb|EAW35263.1| Peptidase C14, caspase catalytic subunit p20 [Lyngbya sp. PCC 8106]
  misc_feature (9)..(612): NCBI GI: 256728431 Blast Desc: NECHADRAFT_87859 [Nectria haematococca mpVI 77-13-4]
  misc_feature (5)..(339): NCBI GI: 154310164 Blast Desc: BC1G_07002 [Botryotinia fuckeliana B05.10] gi|150851563|gb|EDN26756.1| BC1G_07002 [Botryotinia fuckeliana B05.10]
  misc_feature (10)..(558): NCBI GI: 119487607 Blast Desc: L8106_27162 [Lyngbya sp. PCC 8106] gi|119455776|gb|EAW36912.1| L8106_27162 [Lyngbya sp. PCC 8106]
  misc_feature (6)..(340): NCBI GI: 119474521 Blast Desc: caspase, [Neosartorya fischeri NRRL 181] gi|119407289|gb|EAW17239.1| caspase, [Neosartorya fischeri NRRL 181]
  misc_feature (10)..(339): NCBI GI: 119490219 Blast Desc: Peptidase C14, caspase catalytic subunit p20 [Lyngbya sp. PCC 8106] gi|119454105|gb|EAW35258.1| Peptidase C14, caspase catalytic subunit p20 [Lyngbya sp. PCC 8106]
  misc_feature (9)..(261): NCBI GI: 46120498 Blast Desc: FG04896.1 [Gibberella zeae PH-1]
  misc_feature (7)..(340): NCBI GI: 116179376 Blast Desc: CHGG_00316 [Chaetomium globosum CBS 148.51] gi|88184613|gb|EAQ92081.1| CHGG_00316 [Chaetomium globosum CBS 148.51]
  misc_feature (9)..(339): NCBI GI: 256730384 Blast Desc: NECHADRAFT_101119 [Nectria haematococca mpVI 77-13-4]
  misc_feature: Useful for introducing or modulating the production of volatile compounds
MATPSVPKRFALLVGVDLYLNDGSRRHKDDNAVSLTHLKGALNDVTYIRSLLQDQFLFDQLTVLTSSPSQNNPNVPQEPENDWPTHANVKGAFENIRNEAGPGDIFFFHFSGHGAPLEPVLGSPNIGSRNDLSLMTVDYCCGKPAIRGWELNAWLRELHENKVRVIVLLDSCYSGGAWRVDIRFRSPDNWTPPPNVPSDEAAVQGTQKKPGHRDGDLDVCWDLNPRDFTLMTACQNTEKAAEKSENETVYGAFTLALMKYFQTPSHPFNSTYRAICDHTATQIASWELSQNPRVFGRDRLAFLEDFEPISATPVFGTLNDGIVTLPVGKIHGINTGSEFITISTSPRAIVSVDEVYDLESRAQILRGSVQDPSQSDWFIPYRWSSENPLNIIVDPNLGSFFQQKLRDHLETRITGNIQYTQGVEMTKSEAAQAEWFRLGMKEDGGIDIFGPEQTVGDQGPVRGWKTRGKTDDERARDLAIALAHLFRFGQIVQLRNESEDAAPFQMTITSDTDKNSNIDVNYKFQNNDNEELRFAVLILSPGFHVKQLFPATDTLQAVPPGRTQFVPFSLTVPDELKYDKANDQQHGYRDIVRTVVTKGKSVSLKCTELPDIWNADQWDSKRTNGLGRDGNLRDHFSWWIQDEDFTR

SEQ ID NO: 39501 - DNA, 3584 bp, Muscodor strobelii
  misc_feature: SGI EST ID NO. CUFF.95134.0
  misc_feature: Variant of the nucleotide sequence at SEQ ID NO 39499
ctgccgtaaaaatatgcctcttctagagccttatcaggcagttatattgccatcacttctgcagttttgtatgttgaggacttacataaactgtccctaccgagccaacagccattgagaattcactcggtttttttttatgttgatgcagtcagcagaaccgggtgattttcggcgactcctcgcctccctttgccttcacaggtagcctcggtgaaaacatcagcagatagatcctgcagagagctaaaatgaaagtctagttatactgcagaaacaggaaataccaacctctcatatcaaaggccatcatttcaggctgcccctccaagttcttagactacctagttaaaccggtctgttctcagagcttcatgacgtagccatgcaacggggttgcaatctcgcaaggcgccttttcatagtccagctagtagttaattggtagtatattcatgtaggctatggattaatattacctgccttattttcggtgaagattcctactccttatatattaccttttcattgcaattctagctaggttaggaaaggtcaacggtgtagctttgtgctcaaagctttatttctatataaactcatttcagtcagactttagcttggatcttcaacagacgcggcaacaacggacccactcattacattgagtttattcaactgctctgacggttcactcgctggctttcccaagttgaacaagatggcgacgccaagtgtgccaaaacgatttgctctccttgtcggagtagacttgtatctgaacgacggttcgaggcggcacaaagatgacaatgctgtatctctcacgcacttgaaaggggccttgaatgatgtcacatacattcgatcacttcttcaggatcagtttctattcgatcaactcactgtcctcactagttctccatcccagaacaaccctaatgttcctcaagagccagagaatgactggcccacacatgccaacgtcaagggggcatttgaaaatatacgcaacgaggctggtcctggcgatatcttcttcttccacttctctggacatggcgctccgttagagccggtccttgggtcgcctaacattggcagtaggaatgacctatccctgatgacagtggactactgttgcggaaaaccggcgattagaggatgggagctaaatgcatggttacgggaactccatgagaataaagttcgggtcattgtccttcttgacagttgttattctggaggggcttggcgagtcgatatccgtttccgatctcctgataactggacaccccctccaaacgtcccttctgatgaagccgctgtgcagggaacgcagaaaaagccgggccatcgcgacggagatctggatgtatgctgggatctcaatccgagggattttacgctcatgacggcttgccagaacaccgaaaaagctgccgagaaaagtgagaatgagacagtatatggcgcattcaccctcgccctcatgaaatacttccagactccatcacatcccttcaattcaacgtatcgtgcaatttgtgaccataccgctacccagatcgcatcatgggagctgtcacaaaatcctcgggtttttggtcgcgacagattggcatttcttgaagacttcgagccaatttcggcaacgccagtctttggaacgctcaacgacggtatcgtaactctccctgttggcaagattcatggtatcaacacaggatcagagtttatcacaatttcgacgagtcccagggctattgtctcggtagatgaagtctacgatctagaaagtagggcacagattttacggggttccgttcaggatccgtcacagtccgattggttcatcccgtaccggtggagctcggagaatcccttgaacattatcgtggatccgaatctagggagcttctttcagcagaagctccgcgaccacttggagactaggattactggcaacatccaatacacacagggggttgaaatgaccaagagtgaagctgctcaagctgagtggttccgactaggaatgaaagaggatggtggcattgatatcttcggacccgagcagacagtgggtgatcaaggaccagtacgtggttggaagaccagagggaaaaccgacgacgagagagcaagggacttggccattgcgctagctcacctatttcgattcgggcagattgttcaattacggaatgagtccgaggatgcagcaccatttcaaatgaccatcacatctgatactgacaagaattccaacattgatgttaattataagttccagaacaacgacaacgaggaattacgctttgcagttctcatcctcagcccagggttccacgtcaagcagttatttccggctacagacactttacaagcagtacctccgggcagaacacaatttgtcccgttttcattaacagtacctgatgagctgaaatacgacaaggcgaatgatcaacaacatgggtaccgtgatattgtccgtactgttgtaacaaagggtaagagtgtgtcgctcaagtgtacagagctgcctgatatttggaatgccgatcaatgggatagtaagaggacgaatggtttgggcagggacgggaatcttcgtgatcatttcagctggtggatacaagatgaggacttcacaaggtgaacagatacaaccgccttgtgaaactcgtcctcatctgcatctacggacatggacacatgtattaagattctgattcgacaaaatcgacatcgagttcatcgatccgcggagtctatccattcaacatcacatacgaggaagaagaagaacatggcacatattgaacaaggttctctctgtatctagtagctcttttagtcccgctctttggctatcaacctcggagttaagctctaaacatacgttcattgaatatatggaaagcccttgaagtccttctaacgagcgccgtagttctatctattgttacctgcaaaccaagaacatcttacttaaatgcgtatcgcatcagctgatggatcgtaggctcgttatagcaccctaccagttgctcagaaccggcgccatagtatcgatccgggttgccaggcatgagtgagccatctgcgagagggttgaggttcgtgaacggaacttgcccgggagcgcatggctcgaatctggcggtgaatggctgacgcctcctccgtgagtatgcccatcaagggcttggaaaacaccagaatgaggctgcaggagggtagcaatgtatgtgagtaagaccaactggcagtgtttgacttgcatctgacctattttccgcagcttcattgataccaaggcagactttcgaattgagtggatctaggtatggtgagcgggatggctgttagatgtgcacgcccttagctggcagtcatgggaagtgagccgggatatatgaaaacacaggtgcgggatgtgtatctgaatgtgctagggagtagtcgaatcccgctagtgtttggtacctagcgtgtcagcgatagccaaagctgtaggagatcgaattattgctagtactatagcttgaatcggccaaaaaccatcttgtctccgc

SEQ ID NO: 39502 - DNA, 1176 bp, Muscodor strobelii
  misc_feature: SGI cDNA ID NO. 573747
  misc_feature: Encodes the peptide sequence at SEQ ID NO 39503
atgaaagacctgtataccttcgactactctgtacagactgcattgtcaacatatgagaccgttagaaaagcttacaacgagcttttcgacgagctgaaactaccatacctcgtcgccgaagccagttcgggagatataggcggcgatctgagtcatgaataccacttaccgtcgccaataggagaggacaatatcatcagctgcaagtcatgcgattacgtcgcgaacgaagaactcgctaccgcgagacccggcccaatagatgttgggagctggacccagtcacaggtctggaggtgtatctcaaaagatcgaaacaccctcgtaaacgtttggtatccagactggttctccgatgtcgatatcgatactcatgctgtcaaagtcgtgtgtccggacctggactccggcctcgaagatgcgctgccattatgggaagcagctattttcaaagcagcgcagacttcttcacccaagagccctttcaagatcttgaatattgtagattacaggcttggttcggattttgctaaatttcttgccacaaatctcggcgaacttcctgtcttacctttcgagaccaatgtcgacccgtcgaggtttgatctgcaatatgtgacatcgacaccgggcaacgagcctatcaatgcaatacgcattcgagatggagaccactgtccacgatgcacatcgggcgagctgaaagtccagaaagcgatagaactcggacatacattccatctaggaacgaagtactccgatgccctcgaagcaaggatccaagtacccaatgccctattagaaccatccgcacaagcatctaccgacggtgccgcctccttgaaaccaaacgatcagtcaatggtatcaatacagatgggctgccacggcataggcgtctcccgcatcatcggcgccgtcgctacccacctcgcggatgacaagggtctaaactggcctcgtatcatcgcgccatttgaggttatcgtcattcccggtaaaggcacagagaaagatgccgatgaactttcgtccatattgaccgaaccgagcgagacatcggctatcgatttgatagtcgatgatcgcacggagcctttaccctggaagttgaaggatgccgatctcattgggtacaacctatctctcaggttctccatctttcaggccgaataa

SEQ ID NO: 39503 - protein, 391 aa, Muscodor strobelii
  misc_feature: SGI Peptide ID NO. 573747
  misc_feature (1)..(63): Pfam Id: PF00587 Pfam Desc: tRNA synthetase class II core domain (G, H, P, S and T)
  misc_feature (1)..(381): NCBI GI: 164422625 Blast Desc: NCU09892 [Neurospora crassa OR74A] gi|157069749|gb|EAA29381.2| [Neurospora crassa OR74A]
  misc_feature (1)..(379): NCBI GI: 145608824 Blast Desc: MGG_06345 [Magnaporthe grisea 70-15] gi|145016254|gb|EDK00744.1| MGG_06345 [Magnaporthe grisea 70-15]
  misc_feature (1)..(379): NCBI GI: 256735019 Blast Desc: NECHADRAFT_89892 [Nectria haematococca mpVI 77-13-4]
  misc_feature (1)..(379): NCBI GI: 171688027 Blast Desc: protein product [Podospora anserina] gi|170943975|emb|CAP69627.1| protein product [Podospora anserina]
  misc_feature (1)..(379): NCBI GI: 116180206 Blast Desc: CHGG_00731 [Chaetomium globosum CBS 148.51] gi|88185028|gb|EAQ92496.1| CHGG_00731 [Chaetomium globosum CBS 148.51]
  misc_feature (1)..(379): NCBI GI: 46108902 Blast Desc: FG01333.1 [Gibberella zeae PH-1]
  misc_feature (1)..(379): NCBI GI: 154304091 Blast Desc: BC1G_09681 [Botryotinia fuckeliana B05.10] gi|150854316|gb|EDN29508.1| BC1G_09681 [Botryotinia fuckeliana B05.10]
  misc_feature (1)..(379): NCBI GI: 255940600 Blast Desc: Pc16g07440 [Penicillium chrysogenum Wisconsin 54-1255] gi|211585692|emb|CAP93414.1| Pc16g07440 [Penicillium chrysogenum Wisconsin 54-1255]
  misc_feature (1)..(379): NCBI GI: 242768112 Blast Desc: prolyl-tRNA synthetase [Talaromyces stipitatus ATCC 10500] gi|218724701|gb|EED24118.1| prolyl-tRNA synthetase [Talaromyces stipitatus ATCC 10500]
  misc_feature (1)..(379): NCBI GI: 119495835 Blast Desc: prolyl-tRNA synthetase [Neosartorya fischeri NRRL 181] gi|119412856|gb|EAW22797.1| prolyl-tRNA synthetase [Neosartorya fischeri NRRL 181]
  misc_feature (1)..(383): SWISSPROT Homolog: EC 6.1.1.15 Proline--tRNA ligase
MKDLYTFDYSVQTALSTYETVRKAYNELFDELKLPYLVAEASSGDIGGDLSHEYHLPSPIGEDNIISCKSCDYVANEELATARPGPIDVGSWTQSQVWRCISKDRNTLVNVWYPDWFSDVDIDTHAVKVVCPDLDSGLEDALPLWEAAIFKAAQTSSPKSPFKILNIVDYRLGSDFAKFLATNLGELPVLPFETNVDPSRFDLQYVTSTPGNEPINAIRIRDGDHCPRCTSGELKVQKAIELGHTFHLGTKYSDALEARIQVPNALLEPSAQASTDGAASLKPNDQSMVSIQMGCHGIGVSRIIGAVATHLADDKGLNWPRIIAPFEVIVIPGKGTEKDADELSSILTEPSETSAIDLIVDDRTEPLPWKLKDADLIGYNLSLRFSIFQAE

SEQ ID NO: 39504 - DNA, 704 bp, Muscodor strobelii
  misc_feature: SGI EST ID NO. CUFF.95152.0
  misc_feature: Variant of the nucleotide sequence at SEQ ID NO 39502
tgggaagcagctattttcaaagcagcgcagacttcttcacccaagagccctttcaagatcttgaatattgtagattacaggcttggttcggattttgctaaatttcttgccacaaatctcggcgaacttcctgtcttacctttcgagaccaatgtcgacccgtcgaggtttgatctgcaatatgtgacatcgacaccgggcaacgagcctatcaatgcaatacgcattcgagatggagaccactgtccacgatgcacatcgggcgagctgaaagtccagaaagcgatagaactcggacatacattccatctaggaacgaagtactccgatgccctcgaagcaaggatccaagtacccaatgccctattagaaccatccgcacaagcatctaccgacggtgccgcctccttgaaaccaaacgatcagtcaatggtatcaatacagatgggctgccacggcataggcgtctcccgcatcatcggcgccgtcgctacccacctcgcggatgacaagggtctaaactggcctcgtatcatcgcgccatttgaggttatcgtcattcccggtaaaggcacagagaaagatgccgatgaactttcgtccatattgaccgaaccgagcgagacatcggctatcgatttgatagtcgatgatcgcacggagcctttaccctggaagttgaaggatgccgatctcattgggta

SEQ ID NO: 39505 - DNA, 1842 bp, Muscodor strobelii
  misc_feature: SGI cDNA ID NO. 573748
  misc_feature: Encodes the peptide sequence at SEQ ID NO 39506
atgacagcagtatcaaacgcaacatgcgagatcatatccaagaattgctcgcagctcgaaagcctgaacgtatcaggttgtcaatacatggatgcgattgatgtcgcgactgtcgtacagggttgccacaaactcaaggagttgagggctgcagatatccggggattcgatagtttaaaggttgcggaagctatcttccagaggaacacgcttgagcttctggtgctcaacggctgcaaagacctaacggacgagtccttcaagaccatgctgcaaggttccattacacgtcatcccgaggatctcacggtcgggccaatcgtgccagctaggaaacttagctatattaatctaaatggatgcctgcaattgacaaataatagcgttaaagttctggccccctttgttctatcgctcaaaggactccagctcggcggatgtacagccttaaccgataccgctctgcggcctatttttacgtcgactccgcacctcattcttttaaagctaaaccatctttcaaaacttaccaacgaccttctatcgacgcatctcgccaagtcaccttatataaagacgctgcagcatatttctataagtagatgtgaaaacattagtaatgatgggatattaccagttatcggaagatgtgccaacatcaagacaatgttcatggatggcacaagggttagcaaccgtgtccttactaaagcggccaatatagttcgatcacgagcacctcgagtgtcatccggcagctcatgtccctatatcggactcgagctcaatgtgttcgactgcccgcttgttacctgggcaggtattcacgacgttttgttatggaacgcagagatatcgcagccgcatagcgacgagacaatttatcctaaagagaccattggcctggtaggatcatacctatggcatgagacggtagagcagcacacgcagcacgtcctacggggcgacttcgctgcagcgcgaaaactggagagcaaatgggcagatcgcatgcgagccgtggagctagcaagggctacgggtgctggccgacgccgcgggaggcatgggataggagagggcgaaaggttccaggtgtacgacgaagcgagtgtgactagagccaggcgcagtctttgctggcacagtatcggcttagcccagagtcaacaaagagccgaagtccatgttctcccgtgcgacttgcacattggcttcatcgataaactcgataatcttgtccaccgtgctaatgaactcggcggccatgcggaaaggatccctgcggcgcatgatacattcgccacggcgggccgacgtgggttcctttctggagcccctgccacctacaaagtcagcatcgtcgccacctgtccaacatgcggcaaggaccacattccgagcagcaagcaggcgaccgaccatccaggtgggttgccccagtccgaaggagctctaggaaagcattgtcgacgaggctacctgggtccaggcgtgggatcccacgacgccttcgatctgtcggccaccgataccttgcgccaactcgagcgatacgccgacaaagccatgagcctgcccaaccccggccgtcttgctcaagtcctgctcgctaccgaggcccagcagaaagacctcgctagttcatggcccgaataccgcaagatcaatcaggagcagggtcgttggttttttccggtccgtctcaatgctggagactcgggtcgcatgcagtggtggacgagagcgtgcagcaaggaaaccagaggtgccgaccaagagctgtcgactgctcgcaaaaccaggattaccaaagtcctcgcaccttttatcatggcctag

SEQ ID NO: 39506 - protein, 613 aa, Muscodor strobelii
  misc_feature: SGI Peptide ID NO. 573748
  misc_feature (1)..(369): NCBI GI: 46125183 Blast Desc: FG06969.1 [Gibberella zeae PH-1]
  misc_feature (1)..(340): NCBI GI: 154295215 Blast Desc: BC1G_13421 [Botryotinia fuckeliana B05.10] gi|150844148|gb|EDN19341.1| BC1G_13421 [Botryotinia fuckeliana B05.10]
  misc_feature (1)..(342): NCBI GI: 85109814 Blast Desc: NCU06250 [Neurospora crassa OR74A] gi|28924752|gb|EAA33865.1| conserved [Neurospora crassa OR74A]
  misc_feature (1)..(340): NCBI GI: 171686676 Blast Desc: protein product [Podospora anserina] gi|170943299|emb|CAP68952.1| protein product [Podospora anserina]
  misc_feature (1)..(338): NCBI GI: 169623124 Blast Desc: SNOG_14791 [Phaeosphaeria nodorum SN15] gi|111056863|gb|EAT77983.1| SNOG_14791 [Phaeosphaeria nodorum SN15]
  misc_feature (1)..(338): NCBI GI: 189188354 Blast Desc: F-box/LRR repeat containing protein 2 [Pyrenophora tritici-repentis Pt-1C-BFP] gi|187972122|gb|EDU39621.1| F-box/LRR repeat containing protein 2 [Pyrenophora tritici-repentis
  misc_feature (1)..(341): NCBI GI: 255935127 Blast Desc: Pc13g01450 [Penicillium chrysogenum Wisconsin 54-1255] gi|211583210|emb|CAP91214.1| Pc13g01450 [Penicillium chrysogenum Wisconsin 54-1255]
  misc_feature (1)..(340): NCBI GI: 212542989 Blast Desc: F-box domain protein [Penicillium marneffei ATCC 18224] gi|210066556|gb|EEA20649.1| F-box domain protein [Penicillium marneffei ATCC 18224]
  misc_feature (1)..(340): NCBI GI: 242785386 Blast Desc: F-box domain protein [Talaromyces stipitatus ATCC 10500] gi|218720730|gb|EED20149.1| F-box domain protein [Talaromyces stipitatus ATCC 10500]
  misc_feature (1)..(340): NCBI GI: 115442842 Blast Desc: conserved [Aspergillus terreus NIH2624] gi|114188097|gb|EAU29797.1| conserved [Aspergillus terreus NIH2624]
MTAVSNATCEIISKNCSQLESLNVSGCQYMDAIDVATVVQGCHKLKELRAADIRGFDSLKVAEAIFQRNTLELLVLNGCKDLTDESFKTMLQGSITRHPEDLTVGPIVPARKLSYINLNGCLQLTNNSVKVLAPFVLSLKGLQLGGCTALTDTALRPIFTSTPHLILLKLNHLSKLTNDLLSTHLAKSPYIKTLQHISISRCENISNDGILPVIGRCANIKTMFMDGTRVSNRVLTKAANIVRSRAPRVSSGSSCPYIGLELNVFDCPLVTWAGIHDVLLWNAEISQPHSDETIYPKETIGLVGSYLWHETVEQHTQHVLRGDFAAARKLESKWADRMRAVELARATGAGRRRGRHGIGEGERFQVYDEASVTRARRSLCWHSIGLAQSQQRAEVHVLPCDLHIGFIDKLDNLVHRANELGGHAERIPAAHDTFATAGRRGFLSGAPATYKVSIVATCPTCGKDHIPSSKQATDHPGGLPQSEGALGKHCRRGYLGPGVGSHDAFDLSATDTLRQLERYADKAMSLPNPGRLAQVLLATEAQQKDLASSWPEYRKINQEQGRWFFPVRLNAGDSGRMQWWTRACSKETRGADQELSTARKTRITKVLAPFIMA

SEQ ID NO: 39507 - DNA, 1671 bp, Muscodor strobelii
  misc_feature: SGI EST ID NO. CUFF.95300.1
  misc_feature: Variant of the nucleotide sequence at SEQ ID NO 39505
gtagtaggagcctacgatatgggtccagacttcaggatctattgccacggcgccagtgcatttgaggtacgaaccaaatgcgtgtgtgggctgacagggaatctctgcggcaagcaccccgcactacattaattagtcactgcctcccctcccttccctcctcccctcctcccttttccacatctacatctacatccacatccactcttgtcgcctatctcacatactgcatccacatccatccctgcacagaaaccagtgtcagagacaacaccataagcgacgcaaagaactaggttcctttctggagcccctgccacctacaaagtcagcatcgtcgccacctgtccaacatgcggcaaggaccacattccgagcagcaagcaggcgaccgaccatccaggtgggttgccccagtccgaaggagctctaggaaagcattgtcgacgaggctacctgggtccaggcgtgggatgtacgtgatgccttcgctgccttgagacgcgaccagcctctgaacatctccaccatgaaggaagtcggcttccccgccctcaccttggacgacatcgattgatggaccaatgcggatggcacattcggccccgccaccgaagcccacgacgccttcgatctgtcggccaccgataccttgcgccaactcgagcgatacgccgacaaagccatgagcctgcccaaccccggccgtcttgctcaagtcctgctcgctaccgaggcccagcagaaagacctcgctagttcatggcccgaataccgcaagatcaatcaggagcagggtcgttggttttttccggtccgtctcaatgctggagactcgggtcgcatgcagtggtggacgagagcgtgcagcaaggaaaccagaggtgccgaccaagagctgtcgactgctcgcaaaaccaggattaccaaagtcctcgcaccttttatcatggcctagcatgctggcagccgtgcccataccatgagcagtgccgtctgcaaaggtagtatgtgagaaggatggaacagatggctacgtgatactgatgaaagagctgggagaatcatccgatgctagtagggccttatgggagttatcatgtcatgtgcaccagccgccatgcaaagagggcgcaggcgcgtctgcgaccaacagcatcgtggggcatttccgagcgtaaaccgcggctggcaataagagtcgtattggtgaataatgcattccatcggtacagcttcagccgttccattagccagttaatccagggcaatggaatgatgagtcatgagaaggagaccaatgtgcactctctgtgccatcactttcagaccacctaaaggccagaggcaggggcagttcgtaatgttataagtgcgaattcctaacatataacatttaacatatatataggactaggaaggaccggtgcttgaaaaagcgacgttttctattgtttatattgaagtcattctcataaactaatccgtgtcgttaactatgtgcttctacgatcaaacgcattggaaatgcggctactggaagtggggtacattctaagagcagtgtaacaaagagtaccgggctggagagacttgccggttgaagttcgtttacgacaccaaaatggaggacagtcgttgcaagttatgtcagaacaaagtaaagaaaca

SEQ ID NO: 39508 - DNA, 921 bp, Muscodor strobelii
  misc_feature: SGI cDNA ID NO. 573749
  misc_feature: Encodes the peptide sequence at SEQ ID NO 39509
atgagcaaacctttcggattgtttgcctggctttcatttgacgccgatcaagaagactgtccgacgtcggctgtgatatttggctcaatcaacgagacatcgacgaacttcaagttattattgtgtacagtgcctgtcgaacagctggaagttgaggctacactttcgcctttggatcacatagttctcagtgctattcctgacgagagcactgcaaagtctttcacgaactggagcaatgcatatgtaccgggtttctggaactttcagaattacttattggattgcgaaacatgctggtacaacactaagtggcgcggctccgatacctctgacgccgaagagtcatatgaatacgccgatgcatatcttgatcgcactttcagattgctgttctcctggaatagtcaattgagagcagatgatctgattcccgattcctcgttagcggaagtcacgactgcaaagatcattgccgcactctccaacctcactgggttagttcacgcacaatacatcaacctcgcgggccgcacagagccgtccacagtctcagattcacctcatccgattttacaagggaccctctacggacatgatcgtccgcgtattcaacaaaataccgtctcgacctatatattagaagcactacttacgataatcattatttcggtcggtgttttgttctcgactgtggatataaaagagctagtgccatacaatccatgtagtatcgctgcggtcgcaagtctcttggcaggttctagaatgctagaacatattcctccgggagcagaattcatcgagagtgatgaagacttggcggctcttcctgttttccgtgacaactcgtttagtatgggatggtggggtgacgataaggctactgcgaggtttggtattgatatcggtacaaattag

SEQ ID NO: 39509 - protein, 306 aa, Muscodor strobelii
  misc_feature: SGI Peptide ID NO. 573749
  misc_feature (5)..(304): NCBI GI: 145248079 Blast Desc: An13g01490 [Aspergillus niger] gi|134081037|emb|CAK41549.1| protein product [Aspergillus niger]
  misc_feature (18)..(294): NCBI GI: 115400976 Blast Desc: [Aspergillus terreus NIH2624] gi|114190017|gb|EAU31717.1| [Aspergillus terreus NIH2624]
  misc_feature (5)..(304): NCBI GI: 238504406 Blast Desc: conserved [Aspergillus flavus NRRL3357] gi|220690905|gb|EED47254.1| conserved [Aspergillus flavus NRRL3357]
  misc_feature (4)..(302): NCBI GI: 169623034 Blast Desc: SNOG_14743 [Phaeosphaeria nodorum SN15] gi|160704899|gb|EAT77935.2| SNOG_14743 [Phaeosphaeria nodorum SN15]
  misc_feature (5)..(304): NCBI GI: 169764361 Blast Desc: [Aspergillus oryzae RIB40] gi|83764506|dbj|BAE54650.1| protein product [Aspergillus oryzae]
  misc_feature (20)..(291): NCBI GI: 238845466 Blast Desc: conserved [Microsporum canis CBS 113480]
  misc_feature (5)..(290): NCBI GI: 240110383 Blast Desc: CPC735_064150 [Coccidioides posadasii C735 delta SOWgp]
  misc_feature (5)..(290): NCBI GI: 119180568 Blast Desc: CIMG_08905 [Coccidioides immitis RS]
  misc_feature (190)..(303): NCBI GI: 261359225 Blast Desc: conserved [Verticillium albo-atrum VaMs.102]
  misc_feature (20)..(304): NCBI GI: 261198575 Blast Desc: conserved [Ajellomyces dermatitidis SLH14081] gi|239594841|gb|EEQ77422.1| conserved [Ajellomyces dermatitidis SLH14081]
MSKPFGLFAWLSFDADQEDCPTSAVIFGSINETSTNFKLLLCTVPVEQLEVEATLSPLDHIVLSAIPDESTAKSFTNWSNAYVPGFWNFQNYLLDCETCWYNTKWRGSDTSDAEESYEYADAYLDRTFRLLFSWNSQLRADDLIPDSSLAEVTTAKIIAALSNLTGLVHAQYINLAGRTEPSTVSDSPHPILQGTLYGHDRPRIQQNTVSTYILEALLTIIIISVGVLFSTVDIKELVPYNPCSIAAVASLLAGSRMLEHIPPGAEFIESDEDLAALPVFRDNSFSMGWWGDDKATARFGIDIGTN

SEQ ID NO: 39510 - DNA, 4568 bp, Muscodor strobelii
  misc_feature: SGI EST ID NO. CUFF.95174.0
  misc_feature: Variant of the nucleotide sequence at SEQ ID NO 39508
tcagaaccgataaattatcgttaaaacgtctcacccatatttacagtatgcatcatcacgctgaaagtcgtattgtcgatgatgccgacattgccatcgaagtgacgatgtcagcacttcatcattttcagctggccccttcaagatttcgcgacacttcttaggtaacacagcagacaacgctgacgattcagtatgtgatttgcagagccacatattttatgttggaatgattgggggcgagtggcaaagcagctttttttaatcttctcatgcacatttattcgcgctgcaggtccttcgttttggtgggttgcagagccaaaagttatcaggtcctccgcctccgcctgctgctgtcaatgctacgctgttgagctctgctctcgccgctgaaaccgctgcaaaaagctgatcatcgactgacagattccataatgcagcgattcgaaggcgagacaaaatgaggtggtacaacatggcatggtaatagtacatgtatatatatctggcatgcctgctatttctgctgcgctgcgctgctcttggcctttagccttcagcaatattgcccatgacatctgcagcctgtgcgtatgtaacatcactagcttccaagtcaacttgtacgatatcggtcaacatattgtctctgttaatgttttactacaatggcatttgtttcagcggagagaaattttaatcgaaaatacgatgtattcaccgccaattctcgaggatggacgcctttttggctttgtcgttcaatcctttgttcgtttatcattgtcgagattacgttgcttctcggcttgattttcatcttccagtttgatcaaaagcatagtggtcttgtgactactacaacaaaattacaatatctttggacttatggtccaacagctttactatccatattagctactctatggggtcgcgtcgagtacagtgcctgccagatgcaaccttggagactactagctggaggttggacaccagcttcgcgtactctgttactggattacatgtctctgtctcgcccagaagccttcgccaaatccttttattttggacattggcctgttacaattacagtcttttcgtccgttcttctaaaagtgatgactgcatttgcggccggtctcctcatgctggaatatacaaacattaagcatacgaacattactttgcttgctaaagaccgattcgaccgggatatatcatcaagtctcagcggcttacctatcaatagctcgctatatcttttatctgctgtgggtactcaaatcttcgacctcgatttcccggtcggcacatctcgtgacttcgccataccttctctacaaatagaagaccgctcgcaaggtatatataagtgtaagatatagcagacaagggaatagtctaatgactttctgaacgatgagttaacaaaaatagcagtatcgaacaactttactactagtgttacagtcgatacatttcatagcacactagcctgtgaggaagcaattgggctttggaatcctaccatattatgtggcaatgacagcatggaccctaccatgtcaatccaattccaggtggcgtcagagtcctgcgcttcgctcaccgttacctcaaccatccgagactttgccgataatgcaggatgcttttcatcttcttaccaacgcttcggaatccttagctctggaaactgtagcagtaaagatgaaaggcataatccatttcgaatgtttctaggtactggggacatatatgctgagccatacttaaactcttctaatgtttccataactacttctacagcatttgtgtgcgattacctttatgacgtgtctccaagaacagtacgaattgatagtgacgggggcctactcaacatcactccttacactatagatggaggaggccagctcctagaggggcttgccccctcaacgctagctgcccagctattgaacaacttattcttcgcttctgcgcttgaattcggtgccgcagccgacgttaatgtggatttgtttggcgataactcacctttaagcactccgttaatgttggacgatttcttcaaacttttgaccgcagtattgcgcgaaaaggactttggttttctgaatgatccgaatgtggtattagcgaccacgaagcgcctgtacagccttctgtcaacccagtttgcgaaaaataacctcatgagctcatcatcgagtcgcattactggtcttggatacgccatcgagccacgtttacgtattcaacgcctgtcgttatatggcttgattgtggcgatagtcgctatgatcctgctgacaggtatattgcttgttacaacaccgagcatagcttcgagtcggcatccggattctattgggagcctttctacgatagtcgcgcgaagccaaacactacgctgcgctttattgcgctcgaggctgcagtcgactaatgctctacgtcaaagcctgctgggcggttgtcgcacaatgatacacaacaatgactgcggccccgagtaccaaatctgcctgattcaatccaaaggggaaaaggttgatcatgatgttgacacatccatttcaatgcggtcacccatgctagaccgaatcgcatggtgggatccctggcagctccgggtaacgttcaaagtgttactgttcctgttccttgcgtcactagtcattctgttggcagtccttgccgtggtagcagctaagcaagatggtcttgcgtatgttccgggcgatgaatatgcccactacgcttggacttacataccaacaatagtgctgatagctgtgcagaactggatagacggtctcgggtctctataccaaatcttgctaccttactatcagcttcggagtaagtcggcagaaacaagcgaggcactctttaaccacaattcttcacgtctcactatacataactttttcaacagcctgcttaataagcgattggtccattctttcgctttgctctcagttctccttgcaccgtttcttaccacggtcgcaagcggtctttactcggtcaagccaatccaatcgaccagtaaagtaacaatgatgccgacgagcgtgttcagtagctcgttctacacctcgtatagtgatgtggaaatcggatggaaaggcttgggagcagctctagtggttaatggcatccacgcattggacctaccgcaaccaccatggacatatgggccttttgccttttacgaggtctataatctagacaaaagtgcgcagctatcgcgagcggacagtctactaattcggattcctgctgttagagcgtcgctcaattgcacacaagtcgtttcagatgatcggaaccttaccatagccaatgagcagcatgacgaattggaagcaagggtgaattgggtttcttcagagaaaccatcttgtactagcaactcttggagcttcaggctaccatcgaatatgagcaaacctttcggattgtttgcctggctttcatttgacgccgatcaagaagactgtccgacgtcggctgtgatatttggctcaatcaacgagacatcgacgaacttcaagttattattgtgtacagtgcctgtcgaacagctggaagttgaggctacactttcgcctttggatcacatagttctcagtgctattcctgacgagagcactgcaaagtctttcacgaactggagcaatgcatatgtaccgggtttctggaactttcagaattacttattggattgcgaaacatgctggtacaacactaagtggcgcggctccgatacctctgacgccgaagagtcatatgaatacgccgatgcatatcttgatcgcactttcagattgctgttctcctggaatagtcaattgagagcagatgatctgattcccgattcctcgttagcggaagtcacgactgcaaagatcattgccgcactctccaacctcactgggttagttcacgcacaatacatcaacctcgcgggccgcacagagccgtccacagtctcagattcacctcatccgattttacaagggaccctctacggacatgatcgtccgcgtattcaacaaaataccgtctcgacctatatattagaagcactacttacgataatcattatttcggtcggtgttttgttctcgactgtggatataaaagagctagtgccatacaatccatgtagtatcgctgcggtcgcaagtctcttggcaggttctagaatgctagaacatattcctccgggagcagaattcatcgagagtgatgaagacttggcggctcttcctgttttccgtgacaactcgtttagtatgggatggtggggtgacgataaggctactgcgaggtttggtattgatatcggtacaaattagattgagaaaatatgaaagcaacgctagagcaagcgattgagcccttcgtacatgcatctgtaatctgccttgcttctggcttaattccgccaggtcgaaacaatgggcgggctcccttgttgccaagcctccacagcaatccactccagagcaatccacggcaatattgcccagcaatccacgcccacggca

SEQ ID NO: 39511 - DNA, 459 bp, Muscodor strobelii
  misc_feature: SGI cDNA ID NO. 573751
  misc_feature: Encodes the peptide sequence at SEQ ID NO 39512
atgatgcaacgaccgtgccatctgttcgggagcgacgagtggaagccggcatgtccgacaggaagatacatgctggaatctgtcatcgagttcttcggcaaatctacactgtttaaacaagctttcgcacttgagaatggagcatggtcatttcgagaaccagacttcgccaacctcgttgccgaactccgacagtgcgggcttgacaccaacttatggactcacgtcgccggctgtttctacatgtttggtgacatgcttaaagaacattctacaacgccggagactcctcacggctgctcccttcgccagagaggtcctttccgcaaagctgacgaattcctcggagtagtcgacaaggtcgtgcagttcatgaacaacattgacgagcaggtggctcaagaaaacatcacaattggcagagtgataggaggagtggatatgagagcagccaattga

SEQ ID NO: 39512 - protein, 152 aa, Muscodor strobelii
  misc_feature: SGI Peptide ID NO. 573751
MMQRPCHLFGSDEWKPACPTGRYMLESVIEFFGKSTLFKQAFALENGAWSFREPDFANLVAELRQCGLDTNLWTHVAGCFYMFGDMLKEHSTTPETPHGCSLRQRGPFRKADEFLGVVDKVVQFMNNIDEQVAQENITIGRVIGGVDMRAAN

SEQ ID NO: 39513 - DNA, 1595 bp, Muscodor strobelii
  misc_feature: SGI EST ID NO. CUFF.95182.0
  misc_feature: Variant of the nucleotide sequence at SEQ ID NO 39511
ggatccaccttattacatgtcccatgttgtcggatctggttccggttccgcctggtcccctgttatcatctgtcatctcccaacaacgctttgtagggctctctgatcataggtcatctcagcaaactgtttaggtcctcttaccccatcttcccttacctgtgcatcacctcctaagccggcgcttcaggtgtcctcgccaggtttccaactctagcagacagatgaacccgacggtacctgcgtagctcccaacccccgtcgtcaccacccgacctgacagcaccggcctctgtctctgcatcgaccctacagcctcaagctcgaccagatcactccctaccactacctcgtttatcggctgcaatctgttgttcctatcagttcgaaagcacgtcggcgccttctcgcaccgacaactcgtcggataatgatgcaacgacctccactctgagccctgccccgattggcaatctgcagctcgaagcgttccgcatcgtaatatcgatgaccgacccctacttctcagtagtcatcccagtacgcgaggggactccggttaaaatgacagccctttgcccattgtcataggaagacttagtcaaatggttgtacatcttgatgcactgataagttgatctgttccaaattctatttacgcgctgacgaagctatggtcaggtgccatctgttcgggagcgacgagtggaagccggcatgtccgacaggaagatacatgctggaatctgtcatcgagttcttcggcaaatctacactgtttaaacaagctttcgcacttgagaatggagcatggtcatttcgagaaccagacttcgccaacctcgttgccgaactccgacagtgcgggcttgacaccaacttatggactcacgtcgccggctgtttctacatgtttggtgacatgcttaaagaacattctacaacgccggagactcctcacggctgctcccttcgccagagaggtcctttccgcaaagctgacgaattcctcggagtagtcgacaaggtcgtgcagttcatgaacaacattgacgagcaggtggctcaagaaaacatcacaattggcagagtgataggaggagtggatatgagagcagccaattgatgtcaaactatattgcgaatatcctagcattcattcgtccaagcaggcacatataatgcagccattcgtatactgatgtctagcttgtccaatgttagccagttacgtgtcaaatcgaacaccgccaggctattaccgtctattgtccactcgacagctctcgggagctctcggaactgagagtatcgtggattccggactccggtcgtggtgcctggacttgtgctcctgcaatttctcgtgcgtaggcaagtacgatagctggcccctgtcgagcgatcagagagcttggacggagaaaaagcacaagacatcgcattcactaggagaatgggttggctgatgacaagcggcgcagcggacttcttgagtttagttgtgctaatatttccgaaaaatgccattgatcgtaagcaacgagtttcagtctttttgtttgatgttttaggtagtaatgaatggcgttttg

SEQ ID NO: 39514 - DNA, 1065 bp, Muscodor strobelii
  misc_feature: SGI cDNA ID NO. 573752
  misc_feature: Encodes the peptide sequence at SEQ ID NO 39515
atgaaaggcgcaaccccagattctcgccgcggtgttgatttttccacgggcgcatatgtgactggttgtgaaggaccagaggctagcaactcgtggcattgtagaggctacggagcggcgtcttgtatcctccggccttgcgtgagattttataacgcaactattgaaaggggccaaattcaggaatatgctacttcaccaccgggggcgatcgaggatgcgatctttaagcatcaccacgagggtacatggggtgtcgttgacgcggattgcgcgtcccagggtgagattcaaagcctcgaagaacaggggtataatattgattcccgctggattcatcttgatttcaataacgtctcgacaaccggcgatgtcggcttatcattactggaacgcggctgtttgtatgccatgagcagttacgccagctcattatttttagaacgatggcttgatccgcttatgaatgacacaatgcgtgttcgtacagagaaactccctaattcgtctatcgttaatagcccagaaagggaattccgaacgagtaagataccagacataattcagattctgtataacgagacgaagatggatttcgacagcatcgagagagtctaccaaaacatatccgatattgcaacagcttgggttcgcatgtcgggtaacgaaactttttctgttcctgcaactggcgacgttctacactatgcaacttgcctgagcgtaggctgggtctggatatcggtcccggtatctctggcaattttaacgatcgctctgtttacgatggtcttgtttaaatttaagacaccacaggtacctatctggaagctgtctccattggcatggattcttcgatggcgttacgacgattcaagtccagacccattagccactgcgagtaaagaagaaatagagcagatggcgaaaggtattaccgtagctttggccaaggatgctggtaattatgtcgaaatacttgattctcagatagaaacaagtctggatcagatcaagcacctccctgacattgcaaagccggataactcagccgatggcttatag

SEQ ID NO: 39515 - protein, 354 aa, Muscodor strobelii
  misc_feature: SGI Peptide ID NO. 573752
  misc_feature (3)..(286): NCBI GI: 159122521 Blast Desc: conserved [Aspergillus fumigatus A1163]
  misc_feature (3)..(286): NCBI GI: 146324315 Blast Desc: conserved [Aspergillus fumigatus Af293] gi|129556253|gb|EAL85700.2| conserved [Aspergillus fumigatus Af293]
  misc_feature (32)..(270): NCBI GI: 242787121 Blast Desc: conserved [Talaromyces stipitatus ATCC 10500] gi|218721087|gb|EED20506.1| conserved [Talaromyces stipitatus ATCC 10500]
  misc_feature (26)..(306): NCBI GI: 189210465 Blast Desc: conserved [Pyrenophora tritici-repentis Pt-1C-BFP] gi|187977657|gb|EDU44283.1| conserved [Pyrenophora tritici-repentis Pt-1C-BFP]
  misc_feature (1)..(317): NCBI GI: 189194934 Blast Desc: [Pyrenophora tritici-repentis Pt-1C-BFP] gi|187979684|gb|EDU46310.1| [Pyrenophora tritici-repentis Pt-1C-BFP]
  misc_feature (134)..(322): NCBI GI: 145609521 Blast Desc: MGG_13449 [Magnaporthe grisea 70-15] gi|145016885|gb|EDK01315.1| MGG_13449 [Magnaporthe grisea 70-15]
  misc_feature (198)..(318): NCBI GI: 256730090 Blast Desc: [Nectria haematococca mpVI 77-13-4]
MKGATPDSRRGVDFSTGAYVTGCEGPEASNSWHCRGYGAASCILRPCVRFYNATIERGQIQEYATSPPGAIEDAIFKHHHEGTWGVVDADCASQGEIQSLEEQGYNIDSRWIHLDFNNVSTTGDVGLSLLERGCLYAMSSYASSLFLERWLDPLMNDTMRVRTEKLPNSSIVNSPEREFRTSKIPDIIQILYNETKMDFDSIERVYQNISDIATAWVRMSGNETFSVPATGDVLHYATCLSVGWVWISVPVSLAILTIALFTMVLFKFKTPQVPIWKLSPLAWILRWRYDDSSPDPLATASKEEIEQMAKGITVALAKDAGNYVEILDSQIETSLDQIKHLPDIAKPDNSADGL

SEQ ID NO: 39516 - DNA, 659 bp, Muscodor strobelii
  misc_feature: SGI EST ID NO. CUFF.95183.0
  misc_feature: Variant of the nucleotide sequence at SEQ ID NO 39514
cagcatcgagagagtctaccaaaacatatccgatattgcaacagcttgggttcgcatgtcgggtaacgaaactttttctgttcctgcaactggcgacgttctacactatgcaacttgcctgagcgtaggctgggtctggatatcggtcccggtatctctggcaattttaacgatcgctctgtttacgatggtcttgtttaaatttaagacaccacaggtacctatctggaagctgtctccattggcatggattcttcgatggcgttacgacgattcaagtccagacccattagccactgcgagtaaagaagaaatagagcagatggcgaaaggtattaccgtagctttggccaaggatgctggtaattatgtcgaaatacttgattctcagatagaaacaagtctggatcagatcaagcacctccctgacattgcaaagccggataactcagccgatggcttatagctcctggtcttcaagttacaatcgctccggctacggctaggagctcaggtcttttacgatccagatcggtctatggcaatggtctcttgagcaaggtgacagacgcagagccctgcttcttggatcgatgcagctgtaaattggctgtagcgaataggaggcttgaccaagaacttgacaaacttgccatacc

SEQ ID NO: 39517 - DNA, 378 bp, Muscodor strobelii
  misc_feature: SGI cDNA ID NO. 573753
  misc_feature: Elevated expression when VOC is produced
  misc_feature: Encodes the peptide sequence at SEQ ID NO 39518
atgaaacagaagcgaacactgaaacccatcccacatatggactcatatggggatattccaatcgccctttgctcaaaaggtggaaatcactgtccatatgatatctgtagcgatcgcaaaccgttcaagcggcaagaacatttgaagagacacatacgcactgtgcacgggaatccggccgaaatcgccacgatatgccagttttgccaaaagaagttcaaccgcagagataattggagatcccatctcttgttgcacaccaagaaggatgcaagcggtcggacaccatactacgaggacgctcaggctgtgctagacgaggagatgcggaaaacgaaacagcgaaatacaccgaagaagagaatttcagtattataa

SEQ ID NO: 39518 - protein, 125 aa, Muscodor strobelii
  misc_feature: SGI Peptide ID NO. 573753
  misc_feature (20)..(116): NCBI GI: 85075600 Blast Desc: NCU03552 [Neurospora crassa OR74A] gi|28916803|gb|EAA26555.1| [Neurospora crassa OR74A]
  misc_feature (20)..(116): NCBI GI: 18376047 Blast Desc: related to zinc finger protein odd-paired-like (opl) [Neurospora crassa]
  misc_feature (40)..(93): NCBI GI: 149247170 Blast Desc: LELG_00530 [Lodderomyces elongisporus NRRL YB-4239] gi|146447964|gb|EDK42352.1| LELG_00530 [Lodderomyces elongisporus NRRL YB-4239]
  misc_feature (40)..(93): NCBI GI: 68464721 Blast Desc: potential zinc finger transcription factor [Candida albicans SC5314] gi|68465098|ref|XP_723248.1| potential zinc finger transcription factor [Candida albicans SC5314] potential
  misc_feature (40)..(95): NCBI GI: 150866445 Blast Desc: zf-C2H2 Zinc finger, C2H2 type [Pichia stipitis CBS 6054] gi|149387701|gb|ABN68021.2| zf-C2H2 Zinc finger, C2H2 type [Pichia stipitis CBS 6054]
  misc_feature (40)..(93): NCBI GI: 238878688 Blast Desc: conserved [Candida albicans WO-1]
  misc_feature (40)..(95): NCBI GI: 241949533 Blast Desc: transcription factor, [Candida dubliniensis CD36] gi|223640827|emb|CAX45142.1| transcription factor, [Candida dubliniensis CD36]
  misc_feature (21)..(93): NCBI GI: 255728061 Blast Desc: [Candida tropicalis MYA-3404] gi|240133272|gb|EER32828.1| [Candida tropicalis MYA-3404]
  misc_feature (36)..(95): NCBI GI: 146420011 Blast Desc: PGUG_01635 [Pichia guilliermondii ATCC 6260]
  misc_feature (36)..(95): NCBI GI: 190345619 Blast Desc: PGUG_01635 [Pichia guilliermondii ATCC 6260]
  misc_feature: Useful for introducing or modulating the production of volatile compounds
MKQKRTLKPIPHMDSYGDIPIALCSKGGNHCPYDICSDRKPFKRQEHLKRHIRTVHGNPAEIATICQFCQKKFNRRDNWRSHLLLHTKKDASGRTPYYEDAQAVLDEEMRKTKQRNTPKKRISVL

SEQ ID NO: 39519 - DNA, 1650 bp, Muscodor strobelii
  misc_feature: SGI EST ID NO. CUFF.95212.0
  misc_feature: Variant of the nucleotide sequence at SEQ ID NO 39517
tgcgtctccccagtagcatgcgtaactttaagggctgaggtggcaccttcgttatcctatctatcaaccgtattcaacttccaataaaccctttagacggtctttattccagaatggtgaaaatcaaccatgttcggtatgtatccgaaaagtgtaagacccctgaaccgaataaacgctccccttctgcagaagaaagaagctattctcgcacgtacagtggctctctgcattcttgcaagtaccgacatctcagtcaataatttgacggcgagcaatcgcagtggaacttcagatgggtctgcgagtcgcccatggggaagcatttgaaacctttccttgtagctcatcaccaggcggctgcttcttatcagcagctacaactagttctacctaggacccatctactccaacaatcgggtgtcgaacgctggatatctagcctatgtcaatggagcacaacatcgtcaccggtgaggcatcatcagactataagctaactcaactatcgtcagtgtctggcactggtttcccctatgagaccaaagatgaatttcgtcatggctacggctatgaatcgccctcaggaacacttagtcgtagaaaaagtattcagggtcacgctgggaacatgagccgagccgataacattgactttgatcatgggtctatcattaatactcttggaactccacaaggccatcattttcagcctgctaactctcagaacttcctgtattgttgttttgaagagggtaccatttctccactccttgactaccagccgcttgaatattcggttaagggctcagtcttcgaactcgcatcatcatgtccatggcctgacggcagtccagtcaacttgttcgcgaaacgagaactccaagtcctcccccccaaagaaaactcccgatcctggaacgccaacccacacaggtttacattcctatgccgggaaaacgacagatatacgatgtcgatcatgtacagcaaagaacaacagccttgcatcgggccctgggagtccgcatgaaacagaagcgaacactgaaacccatcccacatatggactcatatggggatattccaatcgccctttgctcaaaaggtggaaatcactgtccatatgatatctgtagcgatcgcaaaccgttcaagcggcaagaacatttgaagagacacatacgcactgtgcacgggaatccggccgaaatcgccacgatatgccagttttgccaaaagaagttcaaccgcagagataattggagatcccatctcttgttgcacaccaagaaggatgcaagcggtcggacaccatactacgaggacgctcaggctgtgctagacgaggagatgcggaaaacgaaacagcgaaatacaccgaagaagagaatttcagtattataaaacaatattctggtgatttcacctgttactcccgggcttggttctgctttcgactataatgtccctcagacgtgcatcatctctcccgcctctaatctcagcctctgccttattatagtaacgatcataatgtttcccatattccttgtagctttgagatatacagccgtaacatggagcctatatcatcgctgaattggcaactagagtcgagaaatactgcatggggtaaagtatcaccag

SEQ ID NO: 39520 - DNA, 369 bp, Muscodor strobelii
  misc_feature: SGI cDNA ID NO. 573754
  misc_feature: Encodes the peptide sequence at SEQ ID NO 39521
atggtgatccttctacacaaagttgaaacgtgggacggtttccagctcctgtacatcttcagcaagttctcatcagtccaactcttcaagccgaggacggcccacacaaagaaatcgacatgctatcttgtcgcttcgaacatcaactgtcagcacgaagaagctattaaggcagtctgcgcctggaaggagacttgggaggttgccacttttggaacctgggaggagtataaggagttggttcgacctaccgaggcggaggtcgaagaggtcctgacggaatttggtccgagatttattgaattggctgcggatgtgtgggaggttcaggctggggctttgagagcggcgccgtggatgacgacctaa

SEQ ID NO: 39521 - protein, 122 aa, Muscodor strobelii
  misc_feature: SGI Peptide ID NO. 573754
  misc_feature (1)..(120): NCBI GI: 240104792 Blast Desc: FtsJ-like methyltransferase family protein [Coccidioides posadasii C735 delta SOWgp]
  misc_feature (1)..(120): NCBI GI: 119178221 Blast Desc: CIMG_07967 [Coccidioides immitis RS]
  misc_feature (1)..(120): NCBI GI: 238492087 Blast Desc: conserved [Aspergillus flavus NRRL3357] gi|220695774|gb|EED52116.1| conserved [Aspergillus flavus NRRL3357]
  misc_feature (1)..(120): NCBI GI: 225562093 Blast Desc: conserved [Ajellomyces capsulatus G186AR]
  misc_feature (1)..(120): NCBI GI: 261360672 Blast Desc: conserved [Verticillium albo-atrum VaMs.102]
  misc_feature (1)..(120): NCBI GI: 115433296 Blast Desc: [Aspergillus terreus NIH2624] gi|114189637|gb|EAU31337.1| [Aspergillus terreus NIH2624]
  misc_feature (1)..(118): NCBI GI: 255953451 Blast Desc: Pc21g04320 [Penicillium chrysogenum Wisconsin 54-1255] gi|211589189|emb|CAP95329.1| Pc21g04320 [Penicillium chrysogenum Wisconsin 54-1255]
  misc_feature (1)..(114): NCBI GI: 156030693 Blast Desc: SS1G_14442 [Sclerotinia sclerotiorum 1980] gi|154700833|gb|EDO00572.1| SS1G_14442 [Sclerotinia sclerotiorum 1980]
  misc_feature (1)..(114): NCBI GI: 154292745 Blast Desc: BC1G_14757 [Botryotinia fuckeliana B05.10] gi|150845839|gb|EDN21032.1| BC1G_14757 [Botryotinia fuckeliana B05.10]
  misc_feature (2)..(120): NCBI GI: 171683097 Blast Desc: protein product [Podospora anserina] gi|170941508|emb|CAP67160.1| protein product [Podospora anserina]
MVILLHKVETWDGFQLLYIFSKFSSVQLFKPRTAHTKKSTCYLVASNINCQHEEAIKAVCAWKETWEVATFGTWEEYKELVRPTEAEVEEVLTEFGPRFIELAADVWEVQAGALRAAPWMTT

SEQ ID NO: 39522 - DNA, 2030 bp, Muscodor strobelii
  misc_feature: SGI EST ID NO. CUFF.95254.1
  misc_feature: Variant of the nucleotide sequence at SEQ ID NO 39520
cacaagcgatttttccagctcgaccatttctgcttcgctatcgctgacaggcctgacgtccacgctattacgacgttgagtggtggtctgctgtgctaacatacggtttatactagatgcgagatcgtcaatccgtctctgactccatgctaccgttttattttttttttctcccggcgcgccatagcattgacgaagatgcggccaaggccatgaggtccgtctcctcgacacctgctatggttcaagcagacaaactaaatcccggacgtttccttgactggagagcatctgcatctcggcgggcgatgctaccgccccgtaccgaaaccatggcttgaataccatttcaggtcgggagccggcagcggaaaacatgtgctgtgatcatgtcaaacgatggttacggcatctcattggttcacatggaccatttgtactaagtagcgtggacgcagccatctgtcataatcgagacaaacacatcaaacagcgctcataatatgactctaacagatgacgtttccataagcaaacccgattacataaatcccctcgatttctgattatttccgctgtgagagacagcaacagcacgtacgggttcttcgacagccgaaaacgaaatggagaccaaagagatccatattgagactcctcttgatgtcgggggccaggtgcttctgagtcccagataccaggtccatctctactccctgaagcactctgatgtgtatcggaaactggcagagctcagacacttgagatggaagagcgaagcaggcaacacatacttcaggaaacagcgagatcgggctgacaatgcaactaagaaagtggtcaaaaaattcttttggatgatgcagagtattgcacgagagttgaatgatgctacggacctcttcaacatcgcacattcggaaagagaggttgcttcggtactggattggtgcatggcccccggcggctttctgagtgccatactgtaacataaccgtggtgcccgctgccgcgcgttcagcttgccatgcgaagatggcggacacgaggtgtttctgtcttccaaagagaaagccgacatcaccttcctggacctcaacctcctggcagcagacatgggaataaaatctatcccaccggcccacccagaagcagaaagctttctccctcgccaggtcgagccaggagaatcctttgacctagtcatctgcgacggtcaggtcctccgaacacacaagcgacccgggcaccgcgagcgcctcgagagtacgcgattagtgctcgtccagcttgcgctgggcttggaacacgtccgtaagggcggcaagatggtgatccttctacacaaagttgaaacgtgggacggtttccagctcctgtacatcttcagcaagttctcatcagtccaactcttcaagccgaggacggcccacacaaagaaatcgacatgctatcttgtcgcttcgaacatcaactgtcagcacgaagaagctattaaggcagtctgcgcctggaaggagacttgggaggttgccacttttggaacctgggaggagtataaggagttggttcgacctaccgaggcggaggtcgaagaggtcctgacggaatttggtccgagatttattgaattggctgcggatgtgtgggaggttcaggctggggctttgagagcggcgccgtggatgacgacctaattgactggataggtacagctgacgtgtgtcgctagcggtagctgaccagaggtcgcggggttggatgctatgttgagatgagaatggatgggctgtacaccagatagacaataaaaaggtcttgattcataaatagagatcaaatgtcaatttagttctaagtgttcactagcctacaaaatagggtcgtataataggcgggctattgtcctacgcacaatctttgtgccagaaaatcgtgctctgcccgcgacctggtactactacatggctgccacccgaaccaacactcgcctggacaagggcagtttcagctagcccagtgctcctccc

SEQ ID NO: 39523 - DNA, 1932 bp, Muscodor strobelii
  misc_feature: SGI cDNA ID NO. 573755
  misc_feature: Reduced expression when VOC is produced
  misc_feature: Encodes the peptide sequence at SEQ ID NO 39524
atggtgtgtgtcagtctcgacgatgccgtctttcggactccgccaacagcacgtctaaggcccgcgccccagaatcttgggcggccaaacgtccattctgcggcttccttcaagagccgcagtaagccttggggagagagcagggcgcaagatgctcaatctctgagggatgttacaggcgagcctttctttatcgacgacgagagcagcgatagagaggatatggacggcaagaccgatgcccaatccgatacatcaagcaacaccagctatccgtgcagcccgagtacggcttttgagaggggtgtcaatggagaaccgcctcctacaggaatagcggaaccgacccaacagatggcatcgagcaaagagtcaccatgccacacctcggaaaatacagctgccttgattcctatggccggccaacctcaccactaccccggggaatggtcgtctccccctccagcgcctcttcaaacagatcaatctacaatacatcaggcggaggatcttgtatacagaggcggccatgcccccgagaccatcaacattatagacgagcaagaggtactagaacccgcaataggagatgagtcacttggattgcacgggaataaaccacaaaaccccaactaccacccacagcaatgcgatgaggatacttgtcaagaaggcagaccatgtgattggtgtactcgattcccaagactatctgcgatgttcaaaagcctcccggctaaacccgccacccgtagagagacgagcagagaagctaaatcgctggaggtcgagatagaatcctaccttgacaaggccgcgcttgactctgtctgcctgccacatggatcgctctgcccctccgaagatgagcacgaaacagagcataagcctgacggcagccaatcgccaggacatggttcccacgggaatgagaatacggatgatctaggatccctttgctctcgagacgtaggtggcacagaagacctgactgaggtggccagaccaaattccgaggacctccatcgagagaacctggaaagcacgctgttctcattcaatggaagcaacgactccgagcagaaccggtcttggcagagaaaaggcagagtcaaaacgaaaaaggtgtgcgaccacccgtgcgggaatgccggcaagttatcgctgccaaacaggcggggcttaacggtgctggcacacgccaacttcgacctcgcgttcccaagcacgctggttttgggaacaacgaccaaggggatgctgaacaaggacccaagcaaggtctcgattgtgatgatgttgacagtaacgatgaatatcaacctgcatggaagcgtcgcagaacggccaaccttacccaagacgacaccactcagacacagcggccgcagaaaaggggtcgtcgccctgcccagcaacgaactatccaggcaccaagtcaccgaaacccgtcgtcgacccaacgtctccccagtccgtcatcttcacggtggagcaagcaccaatttggcgaaattcgaagaatggccgcttcagaacgtacttctcaagcgcgtggttgtcagtggagtggaaactttccagttccagtttactctagactcatgccagaagcacggaggcgggcacggggataaacattattcgacggaggatggaagaccttcatcgccttctaaaaggggtgcctcggcaaagggggggttgaccgggaaggatgcatatagccctagcgaagatatgtgtctcttcgagttgaaagaagaacttgggctgccctggaaggaggtctacaagcggttcacgaaatcctttccaggacggagcctcggggctctacaatacgaagatgttcgagtgtcatggcctactccttctctacgcactctctccccttcaccaccgccagagtcgccaacgaccaccggctag

SEQ ID NO: 39524 - protein, 643 aa, Muscodor strobelii
  misc_feature: SGI Peptide ID NO. 573755
  misc_feature (499)..(614): NCBI GI: 256720374 Blast Desc: NECHADRAFT_89122 [Nectria haematococca mpVI 77-13-4]
  misc_feature (499)..(614): NCBI GI: 171678925 Blast Desc: protein product [Podospora anserina] gi|170937533|emb|CAP62191.1| protein product [Podospora anserina]
  misc_feature (501)..(614): NCBI GI: 255930475 Blast Desc: Pc06g01940 [Penicillium chrysogenum Wisconsin 54-1255] gi|211581410|emb|CAP79187.1| Pc06g01940 [Penicillium chrysogenum Wisconsin 54-1255]
  misc_feature (501)..(596): NCBI GI: 116197337 Blast Desc: [Chaetomium globosum CBS 148.51] gi|88178103|gb|EAQ85571.1| [Chaetomium globosum CBS 148.51]
  misc_feature (503)..(574): NCBI GI: 116205177 Blast Desc: [Chaetomium globosum CBS 148.51] gi|88176600|gb|EAQ84068.1| [Chaetomium globosum CBS 148.51]
  misc_feature (506)..(620): NCBI GI: 242811592 Blast Desc: TSTA_097990 [Talaromyces stipitatus ATCC 10500] gi|218714120|gb|EED13543.1| TSTA_097990 [Talaromyces stipitatus ATCC 10500]
  misc_feature (463)..(631): NCBI GI: 119488149 Blast Desc: NFIA_112450 [Neosartorya fischeri NRRL 181] gi|119410776|gb|EAW20721.1| NFIA_112450 [Neosartorya fischeri NRRL 181]
  misc_feature: Useful for introducing or modulating the production of volatile compounds
MVCVSLDDAVFRTPPTARLRPAPQNLGRPNVHSAASFKSRSKPWGESRAQDAQSLRDVTGEPFFIDDESSDREDMDGKTDAQSDTSSNTSYPCSPSTAFERGVNGEPPPTGIAEPTQQMASSKESPCHTSENTAALIPMAGQPHHYPGEWSSPPPAPLQTDQSTIHQAEDLVYRGGHAPETINIIDEQEVLEPAIGDESLGLHGNKPQNPNYHPQQCDEDTCQEGRPCDWCTRFPRLSAMFKSLPAKPATRRETSREAKSLEVEIESYLDKAALDSVCLPHGSLCPSEDEHETEHKPDGSQSPGHGSHGNENTDDLGSLCSRDVGGTEDLTEVARPNSEDLHRENLESTLFSFNGSNDSEQNRSWQRKGRVKTKKVCDHPCGNAGKLSLPNRRGLTVLAHANFDLAFPSTLVLGTTTKGMLNKDPSKVSIVMMLTVTMNINLHGSVAERPTLPKTTPLRHSGRRKGVVALPSNELSRHQVTETRRRPNVSPVRHLHGGASTNLAKFEEWPLQNVLLKRVVVSGVETFQFQFTLDSCQKHGGGHGDKHYSTEDGRPSSPSKRGASAKGGLTGKDAYSPSEDMCLFELKEELGLPWKEVYKRFTKSFPGRSLGALQYEDVRVSWPTPSLRTLSPSPPPESPTTTG

SEQ ID NO: 39525 - DNA, 3727 bp, Muscodor strobelii
  misc_feature: SGI EST ID NO. CUFF.95416.2
  misc_feature: Variant of the nucleotide sequence at SEQ ID NO 39523
ctttctgtctccatttcctgtgtgaatctcgctagggacgacggtcgtgctccgacccatcactccttcgacctgggcgcctttcctgcccttgctacgcctcgaagttacgcgactcgtcgcggacccatgctccttttactgcccatcgttcgatctagctcgagtcgctcagatcattacgctttacgacacccacgagattttctcctttactcaacctcgcatgcccagctaattcgcacgcccaacagtcgctctcgtcgttcatgaatcgacggcaagcacgctcggcggatcaccaaccacccaagtcgcatggcctacctgtactgacgagttccgaaaatgccgcaggtgctgatggcgtcattgcagagataccgggcggcctcctccccttacgtgacttgtttgcagccccccgaccgccttatcttgaacgccctgttggtcctgcttggaccggttacgagcacagctgcggcaagtaattcaggggacgtgtcaagcgagacgcaaagtctgggtcgtgagcggaaattcaagcggcaatgggtggcgaagggtgaagatcagctggaaatgaaagaggtggtctagattggattggttccggagagctgaagaaatgggaagatggggatccgtcacagcaaggggaagcacgaataggacgagctggattccataatgtggattctggtgttgctccgggctcatcatttcacccctgagcatgccggaggacccatgccttcgtataagcgaaggcgaggcaaatatgaacctgcggagctgggaggctaagaccgctgcgcgtatggcagctcggtgaggtctccatccgccgttggcggtattggggtattgggagcggcgcgttgcaaggatcaggttgcgaagccgccctggacagtcttgtgaaggtcgcgttctcccgctgtctcctttctacctcgtcggaaatgtgattggtagagggcctcgtcttctgaccctgctcctgctcctgctcctgcaacctgatcgggggagtcgacgaggccggcaagagcgctaggagagtctgcgctaaatcttccgacccatccagttgcttttaggccatcttcggaaataccgaaagtgctgcgtttccaactcgaggaagtgattcgcgacaagggcgaggaagagttaattgcgcctcctatagccacgccaggctggttccacagatggacgattggcagatgtacgagagaagaggtactggtatcccgaggagctcccggtttcagcaggacattcacagccgaacacgccctttgccactcgttaggaagtagaatgccttgtgcctgggatttgtcttcaacccatccggacgaaaactatatatttctccagaatccgcccttgcaattcgagctgcattctttatatcatctacctgtagcaaaatcccattcactataccttttgctcatatttactcaacacgatggtgtgtgtcagtctcgacgatgccgtctttcggactccgccaacagcacgtctaaggcccgcgccccagaatcttgggcggccaaacgtccattctgcggcttccttcaagagccgcagtaagccttggggagagagcagggcgcaagatgctcaatctctgagggatgttacaggcgagcctttctttatcgacgacgagagcagcgatagagaggatatggacggcaagaccgatgcccaatccgatacatcaagcaacaccagctatccgtgcagcccgagtacggcttttgagaggggtgtcaatggagaaccgcctcctacaggaatagcggaaccgacccaacagatggcatcgagcaaagagtcaccatgccacacctcggaaaatacagctgccttgattcctatggccggccaacctcaccactaccccggggaatggtcgtctccccctccagcgcctcttcaaacagatcaatctacaatacatcaggcggaggatcttgtatacagaggcggccatgcccccgagaccatcaacattatagacgagcaagaggtactagaacccgcaataggagatgagtcacttggattgcacgggaataaaccacaaaaccccaactaccacccacagcaatgcgatgaggatacttgtcaagaaggcagaccatgtgattggtgtactcgattcccaagactatctgcgatgttcaaaagcctcccggctaaacccgccacccgtagagagacgagcagagaagctaaatcgctggaggtcgagatagaatcctaccttgacaaggccgcgcttgactctgtctgcctgccacatggatcgctctgcccctccgaagatgagcacgaaacagagcataagcctgacggcagccaatcgccaggacatggttcccacgggaatgagaatacggatgatctaggatccctttgctctcgagacgtaggtggcacagaagacctgactgaggtggccagaccaaattccgaggacctccatcgagagaacctggaaagcacgctgttctcattcaatggaagcaacgactccggtaggcaacacccaagccagaccgcggcaatccagcaatcccagcgaagtccgccgggcaatggcagagcagaaccggtcttggcagagaaaaggcagagtcaaaacgaaaaaggtgtgcgaccacccgtgcgggaatgccggcaagttatcgctgccaaacaggcggggcttaacggtgctggcacacgccaacttcgacctcgcgttcccaagcacgctggttttgggaacaacgaccaaggggatgctgaacaaggacccaagcaaggtctcgattgtgatgatgttgacagtaacgatgaatatcaacctgcatggaagcgtcgcagaacggccaaccttacccaagacgacaccactcagacacagcggccgcagaaaaggggtcgtcgccctgcccagcaacgaactatccaggcaccaagtcaccgaaacccgtcgtcgacccaacgtctccccagtccgtcatcttcacggtggagcaagcaccaatttggcgaaattcgaagaatggccgcttcagaacgtacttctcaagcgcgtggttgtcagtggagtggaaactttccagttccagtttactctagactcatgccagaagcacggaggcgggcacggggataaacattattcgacggaggatggaagaccttcatcgccttctaaaaggggtgcctcggcaaagggggggttgaccgggaaggatgcatatagccctagcgaagatatgtgtctcttcgagttgaaagaagaacttgggctgccctggaaggaggtctacaagcggttcacgaaatcctttccaggacggagcctcggggctctacaagtacgttactgcaccaagatgaagggaagggtctggaagggtttgatcgtcattttaatacatagatctaacgttaggccgagattacaactatatcgaagttgatccgattacatcgcatatagtacgaagatgttcgagtgtcatggcctactccttctctacgcactctctccccttcaccaccgccagagtcgccaacgaccaccggctagtccgcaaagatccctgcacgggaggacatctagaggcagtggggatcgacatatttgcgcacaaaacaccccctgctcaatattattgatagatgcaagttcgagagagagttcatg

SEQ ID NO: 39526 - DNA, 1539 bp, Muscodor strobelii
  misc_feature: SGI cDNA ID NO. 573756
  misc_feature: Elevated expression when VOC is produced
  misc_feature: Encodes the peptide sequence at SEQ ID NO 39527
atgagcgatgcggcacctctgttcaatatgtctgtccaggatcttgaagtcgatcgaccatcctcgaacggcgttagccaaaccaacttgatctggggcactcttacccagaacatgaatccaattcgactgcccgatgtactaggatttcttggcgcaaagtctcttagctctcaagtcaagctgtatgctggtgttcaattgcctctgccaataaatcaatggcaacttgatgtaacacgatggttcgaaattgtacttgcgtcgctgcaggctgcgtatgtcggtacagtggctggcacatatgtgcccgaactcgagagaacccgtttaggaccgctcacggcgcaagaaagacgactttgcaataataaccaaaaaatacgaagcactgcgtacgcctcattctcgctctttggcttatatatcatatttatcatcggcggtataatcattctgttctcatatacgctagagcccgtccaagctttccttcacgcatatttcggatacaggtcctatgcctatctcgaatggactgcgaactcaagtctacagctacatcgtctggcgcccgaggacttcagcggtgagaaatgggcaagatgtactggcgcggtaccaattacgagtcctgatacgactttggcggagttgaatattgacgacatgactcatcctattgttgggttggttactaaacgcggcattaaggacacgcctttgtacagtattcctgacaatatggaccctgtaattgtgatctgttctggagcttggccccttgctagcttcttcgctccgcttgtcgaatctttccgggacaagcaatatacagcaatatgcaaatcgcctcgggattattctgcgattccttcggatacagatcttaacccggacggctattatcttcgcactcaagttctgactccactcctaaatcagggccaagacgttgtcatcttcatgcactcttacggcggtgtctatggtccagaggcgttgcagggcctcggcaaaagggagagaatggggcgaggattgcaggaaagcgttgtagctctcattttcaatgctgcatttgtagctcccaaaggagtgagtgcaatcgatgcaatgggtctggaccccaaccaccttccagaatatttggatcatgatcgatcgacggacttggtcgcatttaagaaggactccgctaaagcaatgcatttccatgatttaccagatgaagaggctaatagacttgcggagtctctaccgaagcagccttttacatgcttcaacactctagtgtcttgggatccgtatggcgatccaaatttcagagggctcatggcatacatccacacacaggctgacagaatcataccattagagcagcagaaaaagtttgtggaaatagcaggcatcgaacgacttttgctgttgaaaaatttatcgcattctccccatcttgagcagccagcagttctcgctggagtggtagtgaaccttttgtcgactatcctagaggaagaacgtgcatgggtaatttag

SEQ ID NO: 39527 - protein, 512 aa, Muscodor strobelii
  misc_feature: SGI Peptide ID NO. 573756
  misc_feature (67)..(227): NCBI GI: 189194015 Blast Desc: conserved [Pyrenophora tritici-repentis Pt-1C-BFP] gi|187978910|gb|EDU45536.1| conserved [Pyrenophora tritici-repentis Pt-1C-BFP]
  misc_feature (246)..(500): NCBI GI: 169626162 Blast Desc: SNOG_16360 [Phaeosphaeria nodorum SN15] gi|111055226|gb|EAT76346.1| SNOG_16360 [Phaeosphaeria nodorum SN15]
  misc_feature (251)..(506): NCBI GI: 238840275 Blast Desc: conserved [Microsporum canis CBS 113480]
  misc_feature (244)..(498): NCBI GI: 156034851 Blast Desc: SS1G_13361 [Sclerotinia sclerotiorum 1980] gi|154698764|gb|EDN98502.1| SS1G_13361 [Sclerotinia sclerotiorum 1980]
  misc_feature (251)..(496): NCBI GI: 238837612 Blast Desc: conserved [Microsporum canis CBS 113480]
  misc_feature (250)..(499): NCBI GI: 259487984 Blast Desc: TPA: conserved [Aspergillus nidulans FGSC A4]
  misc_feature (251)..(504): NCBI GI: 145235585 Blast Desc: An03g05620 [Aspergillus niger] gi|134058128|emb|CAK38322.1| protein product [Aspergillus niger]
  misc_feature (251)..(488): NCBI GI: 46115632 Blast Desc: FG03658.1 [Gibberella zeae PH-1]
  misc_feature (250)..(499): NCBI GI: 67524189 Blast Desc: AN2552.2 [Aspergillus nidulans FGSC A4] gi|40745501|gb|EAA64657.1| AN2552.2 [Aspergillus nidulans FGSC A4]
  misc_feature (251)..(466): NCBI GI: 169616230 Blast Desc: SNOG_11286 [Phaeosphaeria nodorum SN15] gi|111059874|gb|EAT80994.1| SNOG_11286 [Phaeosphaeria nodorum SN15]
  misc_feature: Useful for introducing or modulating the production of volatile compounds
MSDAAPLFNMSVQDLEVDRPSSNGVSQTNLIWGTLTQNMNPIRLPDVLGFLGAKSLSSQVKLYAGVQLPLPINQWQLDVTRWFEIVLASLQAAYVGTVAGTYVPELERTRLGPLTAQERRLCNNNQKIRSTAYASFSLFGLYIIFIIGGIIILFSYTLEPVQAFLHAYFGYRSYAYLEWTANSSLQLHRLAPEDFSGEKWARCTGAVPITSPDTTLAELNIDDMTHPIVGLVTKRGIKDTPLYSIPDNMDPVIVICSGAWPLASFFAPLVESFRDKQYTAICKSPRDYSAIPSDTDLNPDGYYLRTQVLTPLLNQGQDVVIFMHSYGGVYGPEALQGLGKRERMGRGLQESVVALIFNAAFVAPKGVSAIDAMGLDPNHLPEYLDHDRSTDLVAFKKDSAKAMHFHDLPDEEANRLAESLPKQPFTCFNTLVSWDPYGDPNFRGLMAYIHTQADRIIPLEQQKKFVEIAGIERLLLLKNLSHSPHLEQPAVLAGVVVNLLSTILEEERAWVI

SEQ ID NO: 39528 - DNA, 804 bp, Muscodor strobelii
  misc_feature: SGI EST ID NO. CUFF.95267.0
  misc_feature: Variant of the nucleotide sequence at SEQ ID NO 39526
gccaaaccaacttgatctggggcactcttacccagaacatgaatccaattcgactgcccgatgtactaggatttcttggcgcaaagtctcttagctctcaagtcaagctgtatgctggtgttcaattgcctctgccaataaatcaatggcaacttgatgtaacacgatggttcgaaattgtacttgcgtcgctgcaggctgcgtatgtcggtacagtggctggcacatatgtgcccgaactcgagagaacccgtttaggaccgctcacggcgcaagaaagacgactttgcaataataaccaaaaaatacgaagcactgcgtacgcctcattctcgctctttggcttatatatcatatttatcatcggcggtataatcattctgttctcatatacgctagagcccgtccaagctttccttcacgcatatttcggatacaggtcctatgcctatctcgaatggactgcgaactcaagtctacagctacatcgtctggcgcccgaggacttcagcggtgagaaatgggcaagatgtactggcgcggtaccaattacgagtcctgatacgactttggcggagttgaatattgacgacatgactcatcctattgttgggttggttactaaacgcggcattaaggacacgcctttgtacagtgtgagatgcattgtatagctcttcagtgagtatgagctctcacagtgataggagaagactaactatggcagccttgaaaagtagagtagacggccatttagataggataatagtgggacaaccgtctaattaagtttcgagtaaagcg

SEQ ID NO: 39529 - DNA, 1170 bp, Muscodor strobelii
  misc_feature: SGI cDNA ID NO. 573757
  misc_feature: Elevated expression when VOC is produced
  misc_feature: Encodes the peptide sequence at SEQ ID NO 39530
atgcgtttcagccggacaggatctattaatgacttggaccgtgctgtcgatcttgcagactgggcagttgatgctacacctgaagatcaccctgatcgagctggccggttaaacaacctcggaaacttgctcggtactcgattcgagcggacaggatcgatagacgacctaaaccacaggctctcctcatacgaggaaggctggcattgtcatacagcccccccatccgttcgtattcgcctggctcggcaggccgctcagattcgagcctcgcagcgcgactggaaaggctcaagtcatctgctgcagcaggccgtcgaaatcctccccgacataagtccacggtggttaaggcataccgacaagcaacacatgcttgcagactttgccggcttggcttcggctgccgctgctactgcccttaatgccgggaaagatgtttatgatgctttacgatttctcgagcttggtcgcggcattattgaaaatttgctgatcgaaacccgcggtgatacttctgatcttgcgcacaagcaccctggtttggcagagaaattcatctctcttcgggacgagctagactcgccagagaagggccctactgttctgagctctgctgatcagccgtcttcttgggaatcactctcgagacgacgtcgcgaagctgtgcaggaactggacgagcttcgatcgcggatccgtgctcagcccggattcgagaactttcatctcccgcccactgccgacgatctgaaagctgcagcagatccagaccctatcatcgtcgtcaatctaagcccctaccgctgcgatgcgttcttaatcgagcgcaatcaaattcgggtattagaattgcctgacctaacggtagagaaaatagccggtcgaaccaaagagttgcaaatatctcgtcaactggccactccccctacatcattacttgagtggctatgggacatggtcgctcgtccggtcttggacgcactcgggtttcaagagcctatctccgatacgaagtggcccccccgtgtatggtggattcctacaggactcctgagccagctacctctccatgctgcaggatactacgcaaagggcagctcggacactgtactcgatagggtcatgtcgtctcgcgatgcacaaaacaccgaaccttcccgcgagtag

SEQ ID NO: 39530 - protein, 389 aa, Muscodor strobelii
  misc_feature: SGI Peptide ID NO. 573757
  misc_feature (2)..(378): NCBI GI: 46120502 Blast Desc: FG04898.1 [Gibberella zeae PH-1]
  misc_feature (2)..(378): NCBI GI: 154310162 Blast Desc: BC1G_07001 [Botryotinia fuckeliana B05.10] gi|150851562|gb|EDN26755.1| BC1G_07001 [Botryotinia fuckeliana B05.10]
  misc_feature (2)..(378): NCBI GI: 67516515 Blast Desc: AN0539.2 [Aspergillus nidulans FGSC A4] gi|40747482|gb|EAA66638.1| AN0539.2 [Aspergillus nidulans FGSC A4] gi|259489203|tpe|CBF89281.1| TPA: conserved [Aspergillus FGSC
  misc_feature (21)..(378): NCBI GI: 240106932 Blast Desc: CPC735_017210 [Coccidioides posadasii C735 delta SOWgp]
  misc_feature (11)..(378): NCBI GI: 119474523 Blast Desc: NFIA_006040 [Neosartorya fischeri NRRL 181] gi|119407290|gb|EAW17240.1| conserved [Neosartorya fischeri NRRL 181]
  misc_feature (2)..(378): NCBI GI: 67541931 Blast Desc: AN7129.2 [Aspergillus nidulans FGSC A4] gi|40741941|gb|EAA61131.1| AN7129.2 [Aspergillus nidulans FGSC A4] gi|259483542|tpe|CBF79016.1| TPA: conserved [Aspergillus FGSC
  misc_feature (2)..(373): NCBI GI: 67516399 Blast Desc: AN0481.2 [Aspergillus nidulans FGSC A4] gi|40747424|gb|EAA66580.1| AN0481.2 [Aspergillus nidulans FGSC A4] gi|259489269|tpe|CBF89401.1| TPA: conserved [Aspergillus FGSC
  misc_feature (2)..(378): NCBI GI: 256721670 Blast Desc: NECHADRAFT_44795 [Nectria haematococca mpVI 77-13-4]
  misc_feature (12)..(376): NCBI GI: 46109676 Blast Desc: FG01720.1 [Gibberella zeae PH-1]
  misc_feature (2)..(389): NCBI GI: 46103765 Blast Desc: FG00104.1 [Gibberella zeae PH-1]
  misc_feature: Useful for introducing or modulating the production of volatile compounds
MRFSRTGSINDLDRAVDLADWAVDATPEDHPDRAGRLNNLGNLLGTRFERTGSIDDLNHRLSSYEEGWHCHTAPPSVRIRLARQAAQIRASQRDWKGSSHLLQQAVEILPDISPRWLRHTDKQHMLADFAGLASAAAATALNAGKDVYDALRFLELGRGIIENLLIETRGDTSDLAHKHPGLAEKFISLRDELDSPEKGPTVLSSADQPSSWESLSRRRREAVQELDELRSRIRAQPGFENFHLPPTADDLKAAADPDPIIVVNLSPYRCDAFLIERNQIRVLELPDLTVEKIAGRTKELQISRQLATPPTSLLEWLWDMVARPVLDALGFQEPISDTKWPPRVWWIPTGLLSQLPLHAAGYYAKGSSDTVLDRVMSSRDAQNTEPSRE

SEQ ID NO: 39531 - DNA, 942 bp, Muscodor strobelii
  misc_feature: SGI cDNA ID NO. 573758
  misc_feature: Elevated expression when VOC is produced
  misc_feature: Encodes the peptide sequence at SEQ ID NO 39532
atggaagtgattcgctggtttttggacgtcgaattacttcgtgcggaacacgtcactagttcttaccagaaaacaatgcaatgggaaacagaccaggcatcttgtgagcaacaacggattcaccgattcttcttcgatcgcctggataatgaaaatcgattcacggaattttatgctagtactatccaggctcttgccggcggtcaattcatatgccttgacgactttatgaaagtacccttcagcatcaacggaatatcatatccgcctctggagcatcttttcgatcaggcaaagagacatctcgatccacgaaccggtacagtgagatttttccccacagcatttggtttaggtgatggccacgggggaaatgttatggtccaccgatatggcagcccttcggacatcatgtatatcgactacgaagtcgctggtactcactgccctcttctcgacatggccaaggcaatatataatgatggattcttcaatgtcctctacggagatctgctttctaagaacctcagggaaacgtcaagcggatcaagtatggccgttcaatggtcagttagccctgagagcatcagcatcaaataccgtatcgacatcgacgacatcaccaaagtcacggctattgtcaaacttgagtatattctgcgacctgttcttgatttatatgctaaccatccttcgagcgacgtgcggcttgcaaaaaaagtcctgggatatgcgcttttcgcttgtgcattgctcacaagagacttttcagatcgatctgacctatttttcttgaacgtggcgctgggagtcgaacttgcttgtgacgtgcagagggtcttctttgataccttcgactggacaatgcaagatgacaatgctttgttgaatccggaggccccagtcacagacaggcgtcacaatactgctaaaagcacctaa

SEQ ID NO: 39532 - protein, 313 aa, Muscodor strobelii
  misc_feature: SGI Peptide ID NO. 573758
  misc_feature (6)..(294): NCBI GI: 240273881 Blast Desc: conserved [Ajellomyces capsulatus H143]
  misc_feature (77)..(294): NCBI GI: 154286922 Blast Desc: [Ajellomyces capsulatus NAm1] gi|150407897|gb|EDN03438.1| [Ajellomyces capsulatus NAm1]
  misc_feature (22)..(275): NCBI GI: 158336044 Blast Desc: AM1_2903 [Acaryochloris marina MBIC11017] gi|158306285|gb|ABW27902.1| conserved [Acaryochloris marina MBIC11017]
  misc_feature: Useful for introducing or modulating the production of volatile compounds
MEVIRWFLDVELLRAEHVTSSYQKTMQWETDQASCEQQRIHRFFFDRLDNENRFTEFYASTIQALAGGQFICLDDFMKVPFSINGISYPPLEHLFDQAKRHLDPRTGTVRFFPTAFGLGDGHGGNVMVHRYGSPSDIMYIDYEVAGTHCPLLDMAKAIYNDGFFNVLYGDLLSKNLRETSSGSSMAVQWSVSPESISIKYRIDIDDITKVTAIVKLEYILRPVLDLYANHPSSDVRLAKKVLGYALFACALLTRDFSDRSDLFFLNVALGVELACDVQRVFFDTFDWTMQDDNALLNPEAPVTDRRHNTAKST

SEQ ID NO: 39533 - DNA, 2429 bp, Muscodor strobelii
  misc_feature: SGI EST ID NO. CUFF.95291.0
  misc_feature: Variant of the nucleotide sequence at SEQ ID NO 39531
ttccgattgtcggctgagaagtaccatccatctgacttttcctccaattctcgtggctatatcggtgaagtctgcgacccattacagcattggcacaaagtctttgtcaaagttgggtcacaagcaaagtacgaatcagccattctaccggtcgtgcagaagcactttccagcatgttgtgtacaggaacttcttggagaggatctctcttccggtgcgctcttctttcggctgcaccagggtgagtccctcagccagtatcgattgtattgtaacgccaacggtcttcaaaattcgatggaagtgattcgctggtttttggacgtcgaattacttcgtgcggaacacgtcactagttcttaccagaaaacaatgcaatgggaaacagaccaggcatcttgtgagcaacaacggattcaccgattcttcttcgatcgcctggataatgaaaatcgattcacggaattttatgctagtactatccaggctcttgccggcggtcaattcatatgccttgacgactttatgaaagtacccttcagcatcaacggaatatcatatccgcctctggagcatcttttcgatcaggcaaagagacatctcgatccacgaaccggtacagtgagatttttccccacagcatttggtttaggtgatggccacgggggaaatgttatggtccaccgatatggcagcccttcggacatcatgtatatcgactacgaagtcgctggtactcactgccctcttctcgacatggccaaggcaatatataatgatggattcttcaatgtcctctacggagatctgctttctaagaacctcagggaaacgtcaagcggatcaagtatggccgttcaatggtcagttagccctgagagcatcagcatcaaataccgtatcgacatcgacgacatcaccaaagtcacggctattgtcaaacttgagtatattctgcgacctgttcttgatttatatgctaaccatccttcgagcgacgtgcggcttgcaaaaaaagtcctgggatatgcgcttttcgcttgtgcattgctcacaagagacttttcagatcgatctgacctatttttcttgaacgtggcgctgggagtcgaacttgcttgtgacgtgcagagggtcttctttgataccttcgactggacaatgcaagatgacaatgctttgttgaatccggaggccccagtcacagacaggcgtcacaatactgctaaaagcacctaaccacaggtgtaacgaggatcgactagatcctacaggtcattggtgacagtatagtcaggactattgccattggcaggaggttcttgtatttttacatagtaatcagatagcctttttgtaataggtctttggagtacgagttagggacacacaacaccaaattctattaatattttcaatgttcttctacggaggtcaacggaggagtggaagagaatgtgcaagaagttccagcgcccagaatctaccaagaagctcaagcctcctggatcctacaagttgctatgcacggtcagaggaatagtagccaaaaggtgataccagccatccaatatcgagatcagggttgtaacaagcctgctattcatcacctgatgagataggcagtcaagtctggaggtcttgacttgcaggtaacaataggtaagatcacaggtgcttgctagagaggctataagggctccccatctaattgatagtaagatgcttagattgccggacaatgaagaccagttcaccacgctagcggccacgccatcgtcgagcaattagatgaccagtacaccagtgccagtgagctctagaaccgagcgtcgcacttcgctaaggcacatctctccgtccacctcgatcactgtagcatgatcgttatgtactcattaggcgccatcgagctgcgctaggccaatttgcaagacgcagacttcttgcgaaccaaggcccaagccatcctgtctaggatcggcctgctgtatcgatccctcgggtcgacttcggtctggctcgagatcttttgagtcgcagggatataagaaactgatggctcaggatgcgatacatagtacgtacgtaagaccataatagatcaataccacgaagtgtcgtctactctgcattacagcggacgaatgatcagacgtcagatgacgctgcagcatcaggatagtacttccatgctgcgagcttggcgcacaagagttttttcatgtgacgatttcctcgcagactctttccctttgaaaatcgacggaattctcgatagttctcgatagtggccatacctgttgcatttccgccccgcccaacttcgccatcccttgcctcgattatactgccttgatttggcaggtgaattcgaaattctaatagctgcagggtcccacaggcgcaagtattcacattgtacggaa

SEQ ID NO: 39534 - DNA, 1236 bp, Muscodor strobelii
  misc_feature: SGI cDNA ID NO. 573759
  misc_feature: Encodes the peptide sequence at SEQ ID NO 39535
atggagatcaacgcagaaacagggctcgcatcgagaactcatcctctcaagatcttcaatgtagccaagtctgaatcccggtttttacatgcatgtgcacctatggtgaggtacagcaagcttgccttccgccagactgtccatcattttggcacagatctatgttggacgccgatgattctcgccaaggagttcaacaggaatcaatttgcaagggatagcgatttgaccatgtcaactagccccgagataccaaccatagtgcagtttggcgccaactctcccttggaaatatcgcgtgcgtcgtctcttgtcgcaccattcaccaacggcgtcgatttgaattgtggctgccctcagtcgtgggcttgtgcgtcaaccctcggcgccgccttgatggagcagcgtgaccttgtacgtgacatgttggtcacgacacggcaacgacttcgagatgacggttgggctgtcggtttggaaaacgacgtcgaagaccctaaaggtcgaagcgtgagcgtcaagattcgtgttcacaaggatttgagaaagacggttgactttataacgacggtccttggtcatgaacagaatcggaacattgactggctgacaatccacccacgcacgcgatatatggcctcaacggtgcccatcaatcttgaagctcttgagctgcttactaatatgtttggcgacaagttaccgattctggtgtctggtgacgttttcacattgtcaacattaccttacacgtcgcatttaacaaacgtgcagcctacattcacctcgaaggactctcaccagccacatggtcatccttccaactcacacactaatactaccagttccagccctgggagaccacatctcacaaaactagcaggcttgatgtcggcacgagcactccttaccagacggaaaacaccgaatcccgctctctttgcgggctatgatacttgcccatgggaagcaatcgacctgttcatgaacaatattgctcgagcgccgttacctcttaaactgggcatacaccatctgaccgaaatgtgtggtgctggattcgggccagaccgcggtgcgctactgaacaagaaagagcgcattcgactcaccggatttaataactggattgatattattgattatctggactatgttaagaaacagaaaggcgttgattctatagttagagatcatgaccatttcccgcctagacagccagctgagaatcgctga

SEQ ID NO: 39535 - protein, 411 aa, Muscodor strobelii
  misc_feature: SGI Peptide ID NO. 573759
  misc_feature (31)..(406): Pfam Id: PF01207 Pfam Desc: Dihydrouridine synthase (Dus)
  misc_feature (31)..(147): Pfam Id: PF01207 Pfam Desc: Dihydrouridine synthase (Dus)
  misc_feature (14)..(390): NCBI GI: 46108752 Blast Desc: FG01258.1 [Gibberella zeae PH-1]
  misc_feature (57)..(391): NCBI GI: 85117655 Blast Desc: NCU03195 [Neurospora crassa OR74A] gi|28927102|gb|EAA36059.1| conserved [Neurospora crassa OR74A]
  misc_feature (4)..(384): NCBI GI: 156052667 Blast Desc: SS1G_06500 [Sclerotinia sclerotiorum 1980] gi|154704279|gb|EDO04018.1| SS1G_06500 [Sclerotinia sclerotiorum 1980]
  misc_feature (75)..(395): NCBI GI: 261356357 Blast Desc: tRNA-dihydrouridine synthase [Verticillium albo-atrum VaMs.102]
  misc_feature (75)..(390): NCBI GI: 145613924 Blast Desc: MGG_01257 [Magnaporthe grisea 70-15] gi|145020935|gb|EDK05064.1| MGG_01257 [Magnaporthe grisea 70-15]
  misc_feature (1)..(171): NCBI GI: 256735060 Blast Desc: NECHADRAFT_74526 [Nectria haematococca mpVI 77-13-4]
  misc_feature (35)..(387): NCBI GI: 154314901 Blast Desc: BC1G_04792 [Botryotinia fuckeliana B05.10] gi|150848330|gb|EDN23523.1| BC1G_04792 [Botryotinia fuckeliana B05.10]
  misc_feature (15)..(391): NCBI GI: 149237573 Blast Desc: tRNA-dihydrouridine synthase 4 [Lodderomyces elongisporus NRRL YB-4239] gi|146451260|gb|EDK45516.1| tRNA-dihydrouridine synthase 4 [Lodderomyces elongisporus NRRL
  misc_feature (12)..(391): NCBI GI: 68478245 Blast Desc: potential tRNA dihydrouridine synthase [Candida albicans SC5314] gi|68478366|ref|XP_716804.1| potential tRNA dihydrouridine synthase [Candida albicans SC5314] potential tRNA
  misc_feature (9)..(391): NCBI GI: 50303445 Blast Desc: protein product [Kluyveromyces lactis] gi|49640796|emb|CAH02057.1| KLLA0B02959p [Kluyveromyces lactis]
MEINAETGLASRTHPLKIFNVAKSESRFLHACAPMVRYSKLAFRQTVHHFGTDLCWTPMILAKEFNRNQFARDSDLTMSTSPEIPTIVQFGANSPLEISRASSLVAPFTNGVDLNCGCPQSWACASTLGAALMEQRDLVRDMLVTTRQRLRDDGWAVGLENDVEDPKGRSVSVKIRVHKDLRKTVDFITTVLGHEQNRNIDWLTIHPRTRYMASTVPINLEALELLTNMFGDKLPILVSGDVFTLSTLPYTSHLTNVQPTFTSKDSHQPHGHPSNSHTNTTSSSPGRPHLTKLAGLMSARALLTRRKTPNPALFAGYDTCPWEAIDLFMNNIARAPLPLKLGIHHLTEMCGAGFGPDRGALLNKKERIRLTGFNNWIDIIDYLDYVKKQKGVDSIVRDHDHFPPRQPAENR

SEQ ID NO: 39536 - DNA, 1551 bp, Muscodor strobelii
  misc_feature: SGI EST ID NO. CUFF.95318.2
  misc_feature: Variant of the nucleotide sequence at SEQ ID NO 39534
gcagactttcgtatgtattcatggcactcgtcgtagccaatgagcaatccaagttttgaatggtgattgacactcacttcatatcgactatcctttaatagtatacatactcaagtcggattacagtgtgctcccagctgcttagtcgccatctaccatgccgaggtgacattaataggatggagatcaacgcagaaacagggctcgcatcgagaactcatcctctcaagatcttcaatgtagccaagtctgaatcccggtttttacatgcatgtgcacctatggtgaggtacagcaagccccgagataccaaccatagtgcagtttggcgccaactctcccttggaaatatcgcgtgcgtcgtctcttgtcgcaccattcaccaacggcgtcgatttgaattgtggctgccctcagtcgtgggcttgtgcgtcaaccctcggcgccgccttgatggagcagcgtgaccttgtacgtgacatgttggtcacgacacggcaacgacttcgagatgacggttgggctgtcggtttggaaaacgacgtcgaagaccctaaaggtcgaagcgtgagcgtcaagattcgtgttcacaaggatttgagaaagacggttgactttataacgacggtccttggtcatgaacagaatcggaacattgactggctgacaatccacccacgcacgcgatatatggcctcaacggtgcccatcaatcttgaagctcttgagctgcttactaatatgtttggcgacaagttaccgattctggtgtctggtgacgttttcacattgtcaacattaccttacacgtcgcatttaacaaacgtgcagcctacattcacctcgaaggactctcaccagccacatggtcatccttccaactcacacactaatactaccagttccagccctgggagaccacatctcacaaaactagcaggcttgatgtcggcacgagcactccttaccagtatgtatatcgagacgcaattttgctgcaactagacggaaaacaccgagtgtatatgagaatgattgccggagagtagcacagctgatatctcccaatcacagatcccgctctctttgcgggctatgatacttgcccatgggaagcaatcgacctgttcatgaacaatattgctcgagcgccgttacctcttaaactgggcatacaccatctgaccgaaatgtgtggtgctggattcgggccagaccgcggtgcgctactgaacaagaaagagcgcattcgactcaccggatttaataactggattgatattattgattatctggactatgttaagaaacagaaaggcgttgattctatagttagagatcatgaccatttcccgcctagacagccagctgagaatcgctgagtgttagaatgggcttagagccatactgttggtctatacaggatgactgggattcaaacatcatgtgcatcgtgtagataatggaaccacgttagatcttccggaccagtgccgtgtttatagacgtttacgttacccagaacatcaaagaaaaacgtatctacagtgt

SEQ ID NO: 39537 - DNA, 1521 bp, Muscodor strobelii
  misc_feature: SGI cDNA ID NO. 573760
  misc_feature: Reduced expression when VOC is produced
  misc_feature: Encodes the peptide sequence at SEQ ID NO 39538
atgatgcacccagctgctcccgccctcaccaccgtgcgaggcttcgcaccgacgccaatcgcctcgggcgacgaggactctgacggctgcccgacacccctgctctcggcagccaagcgcggacgccctcttcgtctcgacgacgtcgtaagcgccaactgcagccccgtccttcgcgccgcaccctcgcccgccgtgagcggcatcgccaagctgcgcatgcagctggagcctctcagcctgaccgactcccgcacgagcaccctcgctcgcactcgcagcagcagccggctgcgctaccagagcagcagtgccagccagacgggccgcagtgatgaggacacagcctccgacagcggttctgtctcgtacgaggtcgccctcgaacacgatttcgtaagcgagagcgtgcgcgagaagcccatgctgaacgccatcgagggcgggctcgtgccgcgcaagatgcaggccgacgacttcgagaccctccgatgcctcggcaaaggcacctacggcaccgtgctgctcgtcaagcagcgcaccacaggccgtctctacgcacagaagcagtttaagaaggcatctgtcgtagtgcacaagaaactagtacagcagaccaagaccgaacgtcaaatcctcgagtctgtcaatcgacatccatttgtcgtcagcctatattatgccttccaggacctcgagaagctgtacctgattctcgaatacggccaaggcggcgaactcttcacgcatttgagcaccgagaagatgttttccgaaagcactgccgcgttttacatggcagagatgcttcttgctctgtcttatctccacgagtccctcggcgttgtctaccgggatctgaaacctgagaactgtctcttggatgctcatgggcatcttttattgacagactttggcctctccaaggtggccgtgggggacgacgacagctgcaagtccattctcggtacagttgagtacatggctcctgagatcatcatgggacagaagtatggcaaggcggtggactggtggtcgttcggcgctttgggatatgaccttatgacgggaaacccgccctttcgaggggccaataacgccaagattcagcacaacattgtcaagcagaaagttgtcatgccctacttcctcagtctcgacgccaaagacctcctcgccaaactgctcaggaaagatccagccaagcgcctaggttccaacatgccgaaggatctacagaccatgaagagtcatcgattcttccgcaagatcgactggaagaggctgacagcccgggatatggaaccacccatccagcccctcatcacagatcccgagcttgccgaaaacttcgctcctgagttcacagaactgtctctcagtcccgtcatgaccactaaggatccttggttgagtatgtcccctaggggtagctttaaggaagaccccttcggcggcttcagttttgtggcaccgagtagcctcctagaaaatcaaggattctatatgcaagaggtctag

SEQ ID NO: 39538 - protein, 506 aa, Muscodor strobelii
  misc_feature: SGI Peptide ID NO. 573760
  misc_feature (441)..(493): Pfam Id: PF00433 Pfam Desc: Protein kinase C terminal domain
  misc_feature (160)..(421): Pfam Id: PF00069 Pfam Desc: Protein kinase domain
  misc_feature (291)..(403): Pfam Id: PF07714 Pfam Desc: Protein tyrosine kinase
  misc_feature (1)..(501): NCBI GI: 46107172 Blast Desc: FG00469.1 [Gibberella zeae PH-1]
  misc_feature (1)..(503): NCBI GI: 261356350 Blast Desc: serine/threonine-protein kinase psk1 [Verticillium albo-atrum VaMs.102]
  misc_feature (1)..(506): NCBI GI: 171687261 Blast Desc: protein product [Podospora anserina] gi|170943592|emb|CAP69244.1| protein product [Podospora anserina]
  misc_feature (4)..(504): NCBI GI: 85117664 Blast Desc: serine/threonine-protein kinase psk1 [Neurospora crassa OR74A] gi|28927104|gb|EAA36061.1| serine/threonine-protein kinase psk1 [Neurospora crassa OR74A]
  misc_feature (1)..(503): NCBI GI: 116181538 Blast Desc: CHGG_01397 [Chaetomium globosum CBS 148.51] gi|88185694|gb|EAQ93162.1| CHGG_01397 [Chaetomium globosum CBS 148.51]
  misc_feature (1)..(501): NCBI GI: 39950921 Blast Desc: MGG_01260 [Magnaporthe grisea 70-15] gi|145020932|gb|EDK05061.1| MGG_01260 [Magnaporthe grisea 70-15]
  misc_feature (5)..(497): NCBI GI: 169610485 Blast Desc: SNOG_08341 [Phaeosphaeria nodorum SN15] gi|111063497|gb|EAT84617.1| SNOG_08341 [Phaeosphaeria nodorum SN15]
  misc_feature (7)..(501): NCBI GI: 212526978 Blast Desc: serine/threonine protein kinase, [Penicillium marneffei ATCC 18224] gi|210073044|gb|EEA27131.1| serine/threonine protein kinase, [Penicillium marneffei ATCC
  misc_feature (7)..(501): NCBI GI: 242782258 Blast Desc: serine/threonine protein kinase, [Talaromyces stipitatus ATCC 10500] gi|218720111|gb|EED19530.1| serine/threonine protein kinase, [Talaromyces stipitatus ATCC
  misc_feature (9)..(501): NCBI GI: 226284144 Blast Desc: serine/threonine-protein kinase psk1 [Paracoccidioides brasiliensis Pb01]
  misc_feature (110)..(496): SWISSPROT Homolog: EC 2.7.11.22 Cyclin-dependent kinase
  misc_feature: Useful for introducing or modulating the production of volatile compounds
MMHPAAPALTTVRGFAPTPIASGDEDSDGCPTPLLSAAKRGRPLRLDDVVSANCSPVLRAAPSPAVSGIAKLRMQLEPLSLTDSRTSTLARTRSSSRLRYQSSSASQTGRSDEDTASDSGSVSYEVALEHDFVSESVREKPMLNAIEGGLVPRKMQADDFETLRCLGKGTYGTVLLVKQRTTGRLYAQKQFKKASVVVHKKLVQQTKTERQILESVNRHPFVVSLYYAFQDLEKLYLILEYGQGGELFTHLSTEKMFSESTAAFYMAEMLLALSYLHESLGVVYRDLKPENCLLDAHGHLLLTDFGLSKVAVGDDDSCKSILGTVEYMAPEIIMGQKYGKAVDWWSFGALGYDLMTGNPPFRGANNAKIQHNIVKQKVVMPYFLSLDAKDLLAKLLRKDPAKRLGSNMPKDLQTMKSHRFFRKIDWKRLTARDMEPPIQPLITDPELAENFAPEFTELSLSPVMTTKDPWLSMSPRGSFKEDPFGGFSFVAPSSLLENQGFYMQEV

SEQ ID NO: 39539 - DNA, 2362 bp, Muscodor strobelii
  misc_feature: SGI EST ID NO. CUFF.95339.0
  misc_feature: Variant of the nucleotide sequence at SEQ ID NO 39537
ctgtgaccccctgtcagccgagccgggcggtaccaacgagagctaccgagaattaaagtgtacacatttcttcctggggcccttccttcttcgacctttcttctttctgcctcacccaccatttggtgcagaaatcctcgaccaaaccacgacccgtctcccgacagtattctttccgactgcaaatgcatcagcaacactaccgcgacaactctgcatctgtttcctgccagatgtgcgttccatctgtccagcttgcaaaacttgaccaccttcgcgagccacgcgccgacgctgagcgccgacgcggcacccgcctaccgtgaatcggggcgggttgacacgccattccacgacgtcccgtgtcccagacggacagccataccttatatataccctagaaaggccgcagagccagccagccagacaggcaccgccaggcaagatgatgcacccagctgctcccgccctcaccaccgtgcgaggcttcgcaccgacgccaatcgcctcgggcgacgaggactctgacggctgcccgacacccctgctctcggcagccaagcgcggacgccctcttcgtctcgacgacgtcgtaagcgccaactgcagccccgtccttcgcgccgcaccctcgcccgccgtgagcggcatcgccaagctgcgcatgcagctggagcctctcagcctgaccgactcccgcacgagcaccctcgctcgcactcgcagcagcagccggctgcgctaccagagcagcagtgccagccagacgggccgcagtgatgaggacacagcctccgacagcggttctgtctcgtacgaggtcgccctcgaacacgatttcgtaagcgagagcgtgcgcgagaagcccatgctgaacgccatcgagggcgggctcgtgccgcgcaagatgcaggccgacgacttcgagaccctccgatgcctcggcaaaggcacctacggcaccgtgctgctcgtcaagcagcgcaccacaggccgtctctacgcacagaagcagtttaagaaggcatctgtcgtagtgcacaagaaactagtacagcagaccaagaccgaacgtcaaatcctcgagtctgtcaatcgacatccatttgtcgtcagcctatattatgccttccaggacctcgagaagctgtacctgattctcgaatacggccaaggcggcgaactcttcacgcatttgagcaccgagaagatgttttccgaaagcactgccgcgttttacatggcagagatgcttcttgctctgtcttatctccacgagtccctcggcgttgtctaccgggatctgaaacctgagaactgtctcttggatgctcatgggcatcttttattgacagactttggcctctccaaggtggccgtgggggacgacgacagctgcaagtccattctcggtacagttgagtacatggctcctgagatcatcatgggacagaagtatggcaaggcggtggactggtggtcgttcggcgctttgggatatgaccttatgacgggaaacccgccctttcgaggggccaataacgccaagattcagcacaacattgtcaagcagaaagttgtcatgccctacttcctcagtctcgacgccaaagacctcctcgccaaactgctcaggaaagatccagccaagcgcctaggttccaacatgccgaaggatctacagaccatgaagagtcatcgattcttccgcaagatcgactggaagaggctgacagcccgggatatggaaccacccatccagcccctcatcacagatcccgagcttgccgaaaacttcgctcctgagttcacagaactgtctctcagtcccgtcatgaccactaaggatccttggttgagtatgtcccctaggggtagctttaaggaagaccccttcggcggcttcagttttgtggcaccgagtagcctcctagaaaatcaaggattctatatgcaagaggtctaggtctagctaccaagagacgggcattggttgggggtaccgtatagccagtctggatagactgaatgtccacccggcttcccagtttcatacatgcgctcacttttactggaagctgggactttatcgggcccggctcgcatttatcttaaatccccggcattgtgtgtttgagcgttggattgagttgagctatagatgcgaaagcgacgaggccgatacatatcgtatctaatgatacgttgcagcataaccaaaagaggaaggcagcagatcgtatcacgacttgcctatagttttcatgtctccccttggcactgtctaatgactttgacaagctgagtcagtatatcgaatgcaaactgttgctagatataagtcttaattcttcgaacgtga

SEQ ID NO: 39540 - DNA, 539 bp, Muscodor strobelii
  misc_feature: SGI cDNA ID NO. 573761
  misc_feature: Encodes the peptide sequence at SEQ ID NO 39541
atgatgcacccagctgctcccgccctcaccaccgtgcgaggcttcgcaccgacgccaatcgcctcgggcgacgaggactctgacggctgcccgacacccctgctctcggcagccaagcgcggacgccctcttcgtctcgacgacgtcgtaagcgccaactgcagccccgtccttcgcgccgcaccctcgcccgccgtgagcggcatcgccaagctgcgcatgcagctggagcctctcagcctgaccgactcccgcacgagcaccctcgctcgcactcgcagcagcagccggctgcgctaccagagcagcagtgccagccagacgggccgcagtgatgaggacacagcctccgacagcggttctgtctcgtacgaggtcgccctcgaacacgatttcgtaagcgagagcgtgcgcgagaagcccatgctgaacgccatcgagggcgggctcgtgccgcgcaagatgcaggccgacgacttcgagaccctccgatgcctcggcaaaggcacctacggcaccgtgctgctcgtcaagcagcg

SEQ ID NO: 39541 - protein, 179 aa, Muscodor strobelii
  misc_feature: SGI Peptide ID NO. 573761
  misc_feature (1)..(179): NCBI GI: 46107172 Blast Desc: FG00469.1 [Gibberella zeae PH-1]
  misc_feature (1)..(179): NCBI GI: 261356350 Blast Desc: serine/threonine-protein kinase psk1 [Verticillium albo-atrum VaMs.102]
  misc_feature (1)..(179): NCBI GI: 171687261 Blast Desc: protein product [Podospora anserina] gi|170943592|emb|CAP69244.1| protein product [Podospora anserina]
  misc_feature (1)..(179): NCBI GI: 116181538 Blast Desc: CHGG_01397 [Chaetomium globosum CBS 148.51] gi|88185694|gb|EAQ93162.1| CHGG_01397 [Chaetomium globosum CBS 148.51]
  misc_feature (4)..(179): NCBI GI: 85117664 Blast Desc: serine/threonine-protein kinase psk1 [Neurospora crassa OR74A] gi|28927104|gb|EAA36061.1| serine/threonine-protein kinase psk1 [Neurospora crassa OR74A]
  misc_feature (1)..(179): NCBI GI: 39950921 Blast Desc: MGG_01260 [Magnaporthe grisea 70-15] gi|145020932|gb|EDK05061.1| MGG_01260 [Magnaporthe grisea 70-15]
  misc_feature (5)..(179): NCBI GI: 169610485 Blast Desc: SNOG_08341 [Phaeosphaeria nodorum SN15] gi|111063497|gb|EAT84617.1| SNOG_08341 [Phaeosphaeria nodorum SN15]
  misc_feature (9)..(179): NCBI GI: 226288774 Blast Desc: serine/threonine-protein kinase psk1 [Paracoccidioides brasiliensis Pb18]
  misc_feature (7)..(179): NCBI GI: 242782258 Blast Desc: serine/threonine protein kinase, [Talaromyces stipitatus ATCC 10500] gi|218720111|gb|EED19530.1| serine/threonine protein kinase, [Talaromyces stipitatus ATCC
  misc_feature (9)..(179): NCBI GI: 225681632 Blast Desc: serine/threonine-protein kinase psk1 [Paracoccidioides brasiliensis Pb03]
MMHPAAPALTTVRGFAPTPIASGDEDSDGCPTPLLSAAKRGRPLRLDDVVSANCSPVLRAAPSPAVSGIAKLRMQLEPLSLTDSRTSTLARTRSSSRLRYQSSSASQTGRSDEDTASDSGSVSYEVALEHDFVSESVREKPMLNAIEGGLVPRKMQADDFETLRCLGKGTYGTVLLVKQ

SEQ ID NO: 39542 - DNA, 2362 bp, Muscodor strobelii; identical to SEQ ID NO: 39539
  misc_feature: SGI EST ID NO. CUFF.95339.0
  misc_feature: Variant of the nucleotide sequence at SEQ ID NO 39540

SEQ ID NO: 39543 - DNA, 369 bp, Muscodor strobelii
  misc_feature: SGI cDNA ID NO. 573762
  misc_feature: Encodes the peptide sequence at SEQ ID NO 39544
atgatgcacccagctgctcccgccctcaccaccgtgcgaggcttcgcaccgacgccaatcgcctcgggcgacgaggactctgacggctgcccgacacccctgctctcggcagccaagcgcggacgccctcttcgtctcgacgacgtcgtaagcgccaactgcagccccgtccttcgcgccgcaccctcgcccgccgtgagcggcatcgccaagctgcgcatgcagctggagcctctcagcctgaccgactcccgcacgagcaccctcgctcgcactcgcagcagcagccggctgcgctaccagagcagcagtgccagccagacgggccgcagtgatgaggacacagcctccgacagcggttctgtctcg

SEQ ID NO: 39544 - protein, 123 aa, Muscodor strobelii
  misc_feature: SGI Peptide ID NO. 573762
  misc_feature (1)..(106): NCBI GI: 171687261 Blast Desc: protein product [Podospora anserina] gi|170943592|emb|CAP69244.1| protein product [Podospora anserina]
  misc_feature (1)..(121): NCBI GI: 46107172 Blast Desc: FG00469.1 [Gibberella zeae PH-1]
  misc_feature (2)..(121): NCBI GI: 116181538 Blast Desc: CHGG_01397 [Chaetomium globosum CBS 148.51] gi|88185694|gb|EAQ93162.1| CHGG_01397 [Chaetomium globosum CBS 148.51]
  misc_feature (4)..(113): NCBI GI: 85117664 Blast Desc: serine/threonine-protein kinase psk1 [Neurospora crassa OR74A] gi|28927104|gb|EAA36061.1| serine/threonine-protein kinase psk1 [Neurospora crassa OR74A]
  misc_feature (7)..(91): NCBI GI: 154295698 Blast Desc: BC1G_12852 [Botryotinia fuckeliana B05.10] gi|150843885|gb|EDN19078.1| BC1G_12852 [Botryotinia fuckeliana B05.10]
  misc_feature (1)..(121): NCBI GI: 261356350 Blast Desc: serine/threonine-protein kinase psk1 [Verticillium albo-atrum VaMs.102]
  misc_feature (1)..(94): NCBI GI: 39950921 Blast Desc: MGG_01260 [Magnaporthe grisea 70-15] gi|145020932|gb|EDK05061.1| MGG_01260 [Magnaporthe grisea 70-15]
MMHPAAPALTTVRGFAPTPIASGDEDSDGCPTPLLSAAKRGRPLRLDDVVSANCSPVLRAAPSPAVSGIAKLRMQLEPLSLTDSRTSTLARTRSSSRLRYQSSSASQTGRSDEDTASDSGSVS

SEQ ID NO: 39545 - DNA, 2362 bp, Muscodor strobelii; identical to SEQ ID NO: 39539
  misc_feature: SGI EST ID NO. CUFF.95339.0
  misc_feature: Variant of the nucleotide sequence at SEQ ID NO 39543

SEQ ID NO: 39546 - DNA, 1266 bp, Muscodor strobelii
  misc_feature: SGI cDNA ID NO. 573763
  misc_feature: Elevated expression when VOC is produced
  misc_feature: Encodes the peptide sequence at SEQ ID NO 39547
atgcggtcattattaacttcggcggcattgtccgtcgtcacattgagtacgttgggcaacacgtcgacaataaagaaatgtcccaagaccgatatctgcgtcgcggttggcgttccggaggcatctgcttcctctggaaatggcaatatctatctgcaatttcaggccccgacagattactcgtgggtcgcgttcggcacaggcagccagatgagtaactccaacattttcgtgatgtacgcagacggggatggaaacgtgacggtatcgccccgcgggcgcgccaaccacgttgaacctcagcaccagacaggtggtatcattgacaatggaaaaactatgttggctaatgtgcgatgtgcgaactgcgagtcgtgggatggcggcgagttgagtctgagctcgagcgccaatttcattgcagcttggaaagagggcgacgctctcaactccaaggatttgagtgaggacatcgccgagcacgactcacacagccaatttcaaatcgacctctcttcagcctcgataacatctgacaacaacccatttgttgagtcgagcagtggcggtggcagttcaagcggaggcagttcatccggtggtggagatagtgacggtgatggagactcagacgatcaaggtgatgatggcgatactggcgtcgtaatacctgcctacattcgtgagattccaactctgaaaaaggctcatggcattctcatgaccatcgtcatggttatactatatcctattgggtcacttctaatgcctctggttggaagttgggtccttcacgctgcctggcaaggcgttgccttctctgcaatgtgggccgcgtttgctctgggcattgtcacatcgcaacgcaccggtattagattctccgagactcacacagtcctggggacggtcgtggttgcgctgttcggattccagcccgttggaggatacattcatcatctacattacctgaagcaccaaactcgcgggcttgtttcgcatggacacatctggtatggtcgcattctcatgctgctcggcatcatcaacggcgggcttggtctccagctcgcgagtgcgggaaagtccttgatcgtagcgtacgcagttgttgccggtgtagtatatgtcatttacatcgtgggcgctatttttggcgaagtcaagagaggccgccagttagccaccgggaaggagggtaaggacagtgcgtatcttcgatccaaccacgtgcaattggagcccgtttcatcgtcgcacagataa

SEQ ID NO: 39547 - protein, 421 aa, Muscodor strobelii
  misc_feature: SGI Peptide ID NO. 573763
  misc_feature (1)..(421): NCBI GI: 261356349 Blast Desc: conserved [Verticillium albo-atrum VaMs.102]
  misc_feature (10)..(402): NCBI GI: 171687259 Blast Desc: protein product [Podospora anserina] gi|170943591|emb|CAP69243.1| protein product [Podospora anserina]
  misc_feature (1)..(390): NCBI GI: 46107174 Blast Desc: FG00470.1 [Gibberella zeae PH-1]
  misc_feature (1)..(390): NCBI GI: 256735264 Blast Desc: NECHADRAFT_74927 [Nectria haematococca mpVI 77-13-4]
  misc_feature (20)..(393): NCBI GI: 164427235 Blast Desc: NCU03198 [Neurospora crassa OR74A] gi|157071662|gb|EAA36062.2| NCU03198 [Neurospora crassa OR74A]
  misc_feature (1)..(403): NCBI GI: 256722719 Blast Desc: NECHADRAFT_64607 [Nectria haematococca mpVI 77-13-4]
  misc_feature (32)..(393): NCBI GI: 46110937 Blast Desc: FG02350.1 [Gibberella zeae PH-1]
  misc_feature (16)..(404): NCBI GI: 39950872 Blast Desc: MGG_01255 [Magnaporthe grisea 70-15] gi|145020938|gb|EDK05067.1| MGG_01255 [Magnaporthe grisea 70-15]
  misc_feature (1)..(395): NCBI GI: 189188350 Blast Desc: integral membrane protein [Pyrenophora tritici-repentis Pt-1C-BFP] gi|187972120|gb|EDU39619.1| integral membrane protein [Pyrenophora tritici-repentis Pt-1C-BFP]
  misc_feature (4)..(419): NCBI GI: 156064133 Blast Desc: SS1G_00074 [Sclerotinia sclerotiorum 1980] gi|154690936|gb|EDN90674.1| SS1G_00074 [Sclerotinia sclerotiorum 1980]
  misc_feature: Useful for introducing or modulating the production of volatile compounds
MRSLLTSAALSVVTLSTLGNTSTIKKCPKTDICVAVGVPEASASSGNGNIYLQFQAPTDYSWVAFGTGSQMSNSNIFVMYADGDGNVTVSPRGRANHVEPQHQTGGIIDNGKTMLANVRCANCESWDGGELSLSSSANFIAAWKEGDALNSKDLSEDIAEHDSHSQFQIDLSSASITSDNNPFVESSSGGGSSSGGSSSGGGDSDGDGDSDDQGDDGDTGVVIPAYIREIPTLKKAHGILMTIVMVILYPIGSLLMPLVGSWVLHAAWQGVAFSAMWAAFALGIVTSQRTGIRFSETHTVLGTVVVALFGFQPVGGYIHHLHYLKHQTRGLVSHGHIWYGRILMLLGIINGGLGLQLASAGKSLIVAYAVVAGVVYVIYIVGAIFGEVKRGRQLATGKEGKDSAYLRSNHVQLEPVSSSHR

SEQ ID NO: 39548 - DNA, 1361 bp, Muscodor strobelii
  misc_feature: SGI EST ID NO. CUFF.95345.0
  misc_feature: Variant of the nucleotide sequence at SEQ ID NO 39546
acgcaattaacgctgctagctggcagtggtatcattgacaatggaaaaactatgttggctaatgtgcgatgtgcgaactgcgagtcgtgggatggcggcgagttgagtctgagctcgagcgccaatttcattgcagcttggaaagagggcgacgctctcaactccaaggatttgagtgaggacatcgccgagcacgactcacacagccaatttcaaatcgacctctcttcagcctcgataacatctgacaacaacccatttgttgagtcgagcagtggcggtggcagttcaagcggaggcagttcatccggtggtggagatagtgacggtgatggagactcagacgatcaaggtgatgatggcgatactggcgtcgtaatacctgcctacattcgtgagattccaactctgaaaaaggctcatggcattctcatgaccatcgtcatggttatactatatcctattgggtcacttctaatgcctctggttggaagttgggtccttcacgctgcctggcaaggcgttgccttctctgcaatgtgggccgcgtttgctctgggcattgtcacatcgcaacgcaccggtattagattctccgagactcacacagtcctggggacggtcgtggttgcgctgttcggattccagcccgttggaggatacattcatcatctacattacctgaagcaccaaactcgcgggcttgtttcgcatggacacatctggtatggtcgcattctcatgctgctcggcatcatcaacggcgggcttggtctccagctcgcgagtgcgggaaagtccttgatcgtagcgtacgcagttgttgccggtgtagtatatgtcatttacatcgtgggcgctatttttggcgaagtcaagagaggccgccagttagccaccgggaaggagggtaaggacagtgcgtatcttcgatccaaccacgtgcaattggagcccgtttcatcgtcgcacagataaatatttttgcagaccattgaggatggcagcttaagacagatgaacgtgcgatgatagcagcatgctacctctagttacacagatgaagcttatgctcgggatttctagccgttgatacgagaccacggcggctcgaagcttatcaaaagatcttggggcgctaaaaatgggttgactggattagaagcagaagacacgggtatgcgaggaatgaatcttgcttcatataacgaccagtattctttgtttttaggtaacctggagcaatccactactgcatgtgtatatgagaggagggtcgtatgcgcatgcatttcgaataaggaaagggaccttatggcccaaaccagatcataaactgcggtatccaatttcgaatagca

SEQ ID NO: 39549 - DNA, 1566 bp, Muscodor strobelii
  misc_feature: SGI cDNA ID NO. 573764
  misc_feature: Reduced expression when VOC is produced
  misc_feature: Encodes the peptide sequence at SEQ ID NO 39550
atgatgcacccgtcgcgtcaagcgtatgtggaggaggctgaagaggaccgcggtatgagcttagatgagatccccatggatacagactacgatatgccatcagtgaacgccggcatcgcccccgagagagcctcagcgatcctgtctcaattcgaacgcaagaggaaggctgccaatcttgtcgtacccaccgatgatggccgagtgcgcgcgagactcagagaactgggcgaacccatcaccctgtttggcgagggccctgccgagcgccgtgatcgattaagggagctgttactgaatattgagatggcacaaggctccgccgaggccgcagatgtcgctatggaagatgcccccgacgaggaacaggtcgatcaagaggaggaattttacacaaacggaagccccgggctgttgcaagcacgtcaggacattgcacgcttctccctacccagagccaagcggaggatacagttccaaaaacaggaggcttcaataccactacggacgcatgtcaagtttcgaaaacaaatcaaggaacggctgcaaggattcgagttgcagggcagtcaaacggccggggacaggaatgtgagcatgacgcgcatctcgccaaacggggagatggtggccgcgggcaactggggtggctccatcaaattaatcgaaataccctcgctgaaggagaagatgacactgcgaggccataccaaccgtgtaggcggcatatcgtggtttcccggcgcaacgttgcccggaagtactgtctcccctgatgctgtcaacctggcctcagggggcgctgaggggcaggtcaatctctggtcgctgaccaaggacactccgttgtcgactctggaagggcacggccagcgggtggtccgagtcgagttccacccatccgggcgatacctggcttcagcctctgatgacacgacctggcggttatgggacgtcgagacgacgtcggagctactgctacaggagggtcactctcgtggagtttttgcaataagttataatacggatggatcactcctggccagtggcggcatggatagtatcggaaggatatgggatttaagatctggccgcacggtgatgattctggatggccacctggatggccacatcaagcctatacacggcatcgactggggctccgatgggcacagagtcttgacaggatccgctgatggctggatcaagtgctgggatgtgcgaaaggtgcaaaggacaggtggaataggggcacatagcagcgccgtgtccgatctacgttggttcaaagggctggacgatccactgctaggtacaccaccaggagcggacgacaagggaaaccagctgcctaagaaatccggcagcttctttgtgtcggctggattcgaccgtaaagtcaacgtcttctctgcagacgactggactctagtgcagacgctagagggccacacgggcccggtggcgtcagtggacatcagcagagacggcaaatggatcgtgagcggcggccacgaccggagagtcaacttgtggggtaggattgacagcgagggcttctggtga

SEQ ID NO: 39550 - protein, 521 aa, Muscodor strobelii
  misc_feature: SGI Peptide ID NO. 573764
  misc_feature (280)..(318): Pfam Id: PF00400 Pfam Desc: WD domain, G-beta repeat
  misc_feature (475)..(513): Pfam Id: PF00400 Pfam Desc: WD domain, G-beta repeat
  misc_feature (368)..(406): Pfam Id: PF00400 Pfam Desc: WD domain, G-beta repeat
  misc_feature (322)..(360): Pfam Id: PF00400 Pfam Desc: WD domain, G-beta repeat
  misc_feature (227)..(276): Pfam Id: PF00400 Pfam Desc: WD domain, G-beta repeat
  misc_feature (410)..(471): Pfam Id: PF00400 Pfam Desc: WD domain, G-beta repeat
  misc_feature (69)..(98): Pfam Id: PF08799 Pfam Desc: pre-mRNA processing factor 4 (PRP4) like
  misc_feature (2)..(521): NCBI GI: 164427237 Blast Desc: NCU11251 [Neurospora crassa OR74A] gi|157071663|gb|EDO65285.1| NCU11251 [Neurospora crassa OR74A]
  misc_feature (1)..(520): NCBI GI: 256734551 Blast Desc: [Nectria haematococca mpVI 77-13-4]
  misc_feature (1)..(520): NCBI GI: 261356351 Blast Desc: U4/U6 small nuclear ribonucleoprotein Prp4 [Verticillium albo-atrum VaMs.102]
  misc_feature (1)..(521): NCBI GI: 171687265 Blast Desc: protein product [Podospora anserina] gi|170943594|emb|CAP69246.1| protein product [Podospora anserina]
  misc_feature (1)..(520): NCBI GI: 46107170 Blast Desc: FG00468.1 [Gibberella zeae PH-1]
  misc_feature (2)..(520): NCBI GI: 156062614 Blast Desc: SS1G_01423 [Sclerotinia sclerotiorum 1980] gi|154696759|gb|EDN96497.1| SS1G_01423 [Sclerotinia sclerotiorum 1980]
  misc_feature (2)..(519): NCBI GI: 145613920 Blast Desc: MGG_01259 [Magnaporthe grisea 70-15] gi|145020933|gb|EDK05062.1| MGG_01259 [Magnaporthe grisea 70-15]
  misc_feature (2)..(501): NCBI GI: 154308836 Blast Desc: BC1G_07946 [Botryotinia fuckeliana B05.10] gi|150852572|gb|EDN27764.1| BC1G_07946 [Botryotinia fuckeliana B05.10]
  misc_feature (1)..(521): NCBI GI: 116181536 Blast Desc: CHGG_01396 [Chaetomium globosum CBS 148.51] gi|88185693|gb|EAQ93161.1| CHGG_01396 [Chaetomium globosum CBS 148.51]
  misc_feature (2)..(513): NCBI GI: 238845182 Blast Desc: U4/U6 small nuclear ribonucleoprotein Prp4 [Microsporum canis CBS 113480]
  misc_feature: Useful for introducing or modulating the production of volatile compounds
MMHPSRQAYVEEAEEDRGMSLDEIPMDTDYDMPSVNAGIAPERASAILSQFERKRKAANLVVPTDDGRVRARLRELGEPITLFGEGPAERRDRLRELLLNIEMAQGSAEAADVAMEDAPDEEQVDQEEEFYTNGSPGLLQARQDIARFSLPRAKRRIQFQKQEASIPLRTHVKFRKQIKERLQGFELQGSQTAGDRNVSMTRISPNGEMVAAGNWGGSIKLIEIPSLKEKMTLRGHTNRVGGISWFPGATLPGSTVSPDAVNLASGGAEGQVNLWSLTKDTPLSTLEGHGQRVVRVEFHPSGRYLASASDDTTWRLWDVETTSELLLQEGHSRGVFAISYNTDGSLLASGGMDSIGRIWDLRSGRTVMILDGHLDGHIKPIHGIDWGSDGHRVLTGSADGWIKCWDVRKVQRTGGIGAHSSAVSDLRWFKGLDDPLLGTPPGADDKGNQLPKKSGSFFVSAGFDRKVNVFSADDWTLVQTLEGHTGPVASVDISRDGKWIVSGGHDRRVNLWGRIDSEGFW

SEQ ID NO: 39551 - DNA, 2017 bp, Muscodor strobelii
  misc_feature: SGI EST ID NO. CUFF.95333.0
  misc_feature: Variant of the nucleotide sequence at SEQ ID NO 39549
caagcgtccgtcctaggagcacttgagtacctacaactgcagcagctagtacctaagcctcaggcagagcatctatcttacgacttggaccttgacaacttagttgcgcgcagcctgcctggcccttggaccgttctattgccttccgccctcaaaatacctggtccaatcgactgcaacactcgaaactacggctgggcctcttggtcccacggatcgcccgtcatgatgcacccgtcgcgtcaagcgtatgtggaggaggctgaagaggaccgcggtatgagcttagatgagatccccatggatacagactacgatatgccatcagtgaacgccggcatcgcccccgagagagcctcagcgatcctgtctcaattcgaacgcaagaggaaggctgccaatcttgtcgtacccaccgatgatggccgagtgcgcgcgagactcagagaactgggcgaacccatcaccctgtttggcgagggccctgccgagcgccgtgatcgattaagggagctgttactgaatattgagatggcacaaggctccgccgaggccgcagatgtcgctatggaagatgcccccgacgaggaacaggtcgatcaagaggaggaattttacacaaacggaagccccgggctgttgcaagcacgtcaggacattgcacgcttctccctacccagagccaagcggaggatacagttccaaaaacaggaggcttcaataccactacggacgcatgtcaagtttcgaaaacaaatcaaggaacggctgcaaggattcgagttgcagggcagtcaaacggccggggacaggaatgtgagcatgacgcgcatctcgccaaacggggagatggtggccgcgggcaactggggtggctccatcaaattaatcgaaataccctcgctgaaggagaagatgacactgcgaggccataccaaccgtgtaggcggcatatcgtggtttcccggcgcaacgttgcccggaagtactgtctcccctgatgctgtcaacctggcctcagggggcgctgaggggcaggtcaatctctggtcgctgaccaaggacactccgttgtcgactctggaagggcacggccagcgggtggtccgagtcgagttccacccatccgggcgatacctggcttcagcctctgatgacacgacctggcggttatgggacgtcgagacgacgtcggagctactgctacaggagggtcactctcgtggagtttttgcaataagttataatacggatggatcactcctggccagtggcggcatggatagtatcggaaggatatgggatttaagatctggccgcacggtgatgattctggatggccacctggatggccacatcaagcctatacacggcatcgactggggctccgatgggcacagagtcttgacaggatccgctgatggctggatcaagtgctgggatgtgcgaaaggtgcaaaggacaggtggaataggggcacatagcagcgccgtgtccgatctacgttggttcaaagggctggacgatccactgctaggtacaccaccaggagcggacgacaagggaaaccagctgcctaagaaatccggcagcttctttgtgtcggctggattcgaccgtaaagtcaacgtcttctctgcagacgactggactctagtgcagacgctagagggccacacgggcccggtggcgtcagtggacatcagcagagacggcaaatggatcgtgagcggcggccacgaccggagagtcaacttgtggggtaggattgacagcgagggcttctggtgaccgctgtaacaactgtagattaccttgcgcgcggagaaggggaggatgattactgatacccaatggataaatgttactcaatgattgcggcttcctaccaacggtctggtctcagccaccttggtacgtttgcgaggtccaagcctggattgcttgtccttaagatgagatgcccttggctcggctatctaccgtatgcagtatatatatctaccagtgttcagac

SEQ ID NO: 39552 - DNA, 1383 bp, Muscodor strobelii
  misc_feature: SGI cDNA ID NO. 573765
  misc_feature: Reduced expression when VOC is produced
  misc_feature: Encodes the peptide sequence at SEQ ID NO 39553
atggcgagtatcgatcgataccgccctccgcctcgtgaaggctatcagccacccgtcctgccccccaaacccacgaaccccgagcccccgaccgactcgccctcacgaagacgcgacgttccgccgcccgctccctcgccgcccacccactcctcgcgcacatcgcctcccaaacccacccctcactcccataccagtgctgcgctcccgggtgacccttcgcccacatccccggcgcctcgcacccacgtcaccatggccagccagtggttcttcacccagaacgagatcctcagcagtcccagcatcctcgacggcctgccccccgccgaggagagactgagacgggccaagggcgtcaacttcatctaccaggccggagtgctcctcgagctcccccagatcaccctctacgtcgccggtgtctttttccaccgcttctacatgaggcgcagcatggtcgaggagaagcaaggagtgcatcactacaacattgccgctacctctctgttccttgccaacaagacggaagagaactgcaggaagaccaaagacatcatcatcgcggtggccaaggtcgcccagaagaacccaaagctggttgtcgacgagcagtccaaggagtactggcgatggcgcgacagcattctgatgtacgaggaggtaatgctggagtgtctcacctttgatgtcatgctcgacaacccacacttcaaactttacgagttcctgggaaatgtgggcatgatccacaacaagaatctgaggcacgcggcctgggcgttctgcaacgatgccggcctgaccatcatgcccctgctgatggactcgagggacatcgccatcgcgtccatcttcttctccagcaacttcacgaacgagcagatcgaggatcaagacggggtatcatggtataaagcactcggcgccaacgaggcgcactgcatcaagtcaatcgagatcatgaaggagttctacacggagaacccgctgaggaaatcagagaacccatataatggatcgcccaactttagcctggagaacacgagacgtagaggcgacgacctgggctcgagcaacaacgcgtcgccggggtcggaggccgcaacgcagagtcccaaatctagggtgaatggcgtagatgaagatgcggcgcagcgggaaatcgagacggcagctgccgagtccgcgtcgcaaagcgcgccgggcgactcggacgcggtgcttaaagaggctgctaacaaccttgccgtccactcgggtgccggagacagcttgccatcgccttctaagcggaaagaagccggctcgttaagttcagatagccgcgagcagaaacggcaacggctcagctcggtcgacgaaggtgaggtcgacgagtag

SEQ ID NO: 39553 - protein, 460 aa, Muscodor strobelii
  misc_feature: SGI Peptide ID NO. 573765
  misc_feature (1)..(460): NCBI GI: 261356352 Blast Desc: cyclin-K [Verticillium albo-atrum VaMs.102]
  misc_feature (1)..(460): NCBI GI: 46107168 Blast Desc: FG00467.1 [Gibberella zeae PH-1]
  misc_feature (1)..(406): NCBI GI: 256734552 Blast Desc: [Nectria haematococca mpVI 77-13-4]
  misc_feature (1)..(460): NCBI GI: 145613922 Blast Desc: MGG_01258 [Magnaporthe grisea 70-15] gi|145020934|gb|EDK05063.1| MGG_01258 [Magnaporthe grisea 70-15]
  misc_feature (129)..(459): NCBI GI: 164427239 Blast Desc: NCU11252 [Neurospora crassa OR74A] gi|157071664|gb|EDO65286.1| conserved [Neurospora crassa OR74A]
  misc_feature (90)..(458): NCBI GI: 171687267 Blast Desc: protein product [Podospora anserina] gi|170943595|emb|CAP69247.1| protein product [Podospora anserina]
  misc_feature (62)..(374): NCBI GI: 159127627 Blast Desc: cyclin [Aspergillus fumigatus A1163]
  misc_feature (62)..(374): NCBI GI: 146323398 Blast Desc: cyclin [Aspergillus fumigatus Af293] gi|129558310|gb|EBA27465.1| cyclin, [Aspergillus fumigatus Af293]
  misc_feature (88)..(360): NCBI GI: 119187003 Blast Desc: CIMG_03549 [Coccidioides immitis RS]
  misc_feature (89)..(340): NCBI GI: 189204590 Blast Desc: cyclin Pch1 [Pyrenophora tritici-repentis Pt-1C-BFP] gi|187985729|gb|EDU51217.1| cyclin Pch1 [Pyrenophora tritici-repentis Pt-1C-BFP]
  misc_feature: Useful for introducing or modulating the production of volatile compounds
MASIDRYRPPPREGYQPPVLPPKPTNPEPPTDSPSRRRDVPPPAPSPPTHSSRTSPPKPTPHSHTSAALPGDPSPTSPAPRTHVTMASQWFFTQNEILSSPSILDGLPPAEERLRRAKGVNFIYQAGVLLELPQITLYVAGVFFHRFYMRRSMVEEKQGVHHYNIAATSLFLANKTEENCRKTKDIIIAVAKVAQKNPKLVVDEQSKEYWRWRDSILMYEEVMLECLTFDVMLDNPHFKLYEFLGNVGMIHNKNLRHAAWAFCNDAGLTIMPLLMDSRDIAIASIFFSSNFTNEQIEDQDGVSWYKALGANEAHCIKSIEIMKEFYTENPLRKSENPYNGSPNFSLENTRRRGDDLGSSNNASPGSEAATQSPKSRVNGVDEDAAQREIETAAAESASQSAPGDSDAVLKEAANNLAVHSGAGDSLPSPSKRKEAGSLSSDSREQKRQRLSSVDEGEVDE

SEQ ID NO: 39554 - DNA, 2345 bp, Muscodor strobelii
  misc_feature: SGI EST ID NO. CUFF.95391.1
  misc_feature: Variant of the nucleotide sequence at SEQ ID NO 39552
attccgataaagatgaaagagcagggccggagctgcgattgcgactcgctgctcccacaaccacacctgccgacagcattcacaacctatccaaggtttaaaggataggctatagcccaagcaagggtactcgctgctaggtggccaccgacagcgcggatggtcttgcacttggtatcgcctccttcgctccctccaccgagaccatctgcagtcgtcgtcattgtctgcatcgttgtggcccgccgccaacaccaccgcgcgccacccctcataggtcctcggatcgcaacatcgtgacatcgtgccctgggagcgctgcatctctcgcaactgcgccaactgcgccaactgcgatacgacagccatacctcctcctgccggcccgcgcaccagcccctctgcgcttccgccacccgtccgttctcctcgggccagcgcgccatggcgagtatcgatcgataccgccctccgcctcgtgaaggctatcagccacccgtcctgccccccaaacccacgaaccccgagcccccgaccgactcgccctcacgaagacgcgacgttccgccgcccgctccctcgccgcccacccactcctcgcgcacatcgcctcccaaacccacccctcactcccataccagtgctgcgctcccgggtgacccttcgcccacatccccggcgcctcgcacccacgtcaccatggccagccagtggttcttcacccagaacgagatcctcagcagtcccagcatcctcgacggcctgccccccgccgaggagagactgagacgggccaagggcgtcaacttcatctaccaggccggagtgctcctcgagctcccccagatcaccctctacgtcgccggtgtctttttccaccgcttctacatgaggcgcagcatggtcgaggagaagcaaggagtgcatcactacaacattgccgctacctctctgttccttgccaacaagacggaagagaactgcaggaagaccaaagacatcatcatcgcggtggccaaggtcgcccagaagaacccaaagctggttgtcgacgagcagtccaaggagtactggcgatggcgcgacagcattctgatgtacgaggaggtaatgctggagtgtctcacctttgatgtcatgctcgacaacccacacttcaaactttacgagttcctgggaaatgtgggcatgatccacaacaagaatctgaggcacgcggcctgggcgttctgcaacgatgccggcctgaccatcatgcccctgctgatggactcgagggacatcgccatcgcgtccatcttcttctccagcaacttcacgaacgagcagatcgaggatcaagacggggtatcatggtataaagcactcggcgccaacgaggcgcactgcatcaagtcaatcgagatcatgaaggagttctacacggagaacccgctgaggaaatcagagaacccatataatggatcgcccaactttagcctggagaacacgagacgtagaggcgacgacctgggctcgagcaacaacgcgtcgccggggtcggaggccgcaacgcagagtcccaaatctagggtgaatggcgtagatgaagatgcggcgcagcgggaaatcgagacggcagctgccgagtccgcgtcgcaaagcgcgccgggcgactcggacgcggtgcttaaagaggctgctaacaaccttgccgtccactcgggtgccggagacagcttgccatcgccttctaagcggaaagaagccggctcgttaagttcagatagccgcgagcagaaacggcaacggctcagctcggtcgacgaaggtgaggtcgacgagtaggtccctttccgcgtgagggatacggacggaggcgagagaacggcagacgaccacatgctacgtctcggcgagccgtaatactaatggttattttcgatgcaagagacaagggtgtcaaaaggcaatcgagggccgaccgagactcggggcgatggcatggagtggaggcgagagtggaaacccaaattggatgttttatggtggctggggcgttgggcacaagtcatttattgctttgtacagatagcaggcttgacaggacggcatgagtccgcatgttatttatgtaacagtaggaggggtgtcacgagcgtggaaaggcgacatacaatagggatagcatgtatgtgtacggttctgctgctgccggatgcgacggcaagtcagagcgatggatgggataccattgcttacagtgtagactttccaagatatactgctggatattcagtacaattcaagctcagagatgcggcatcgttagcaatcttgaatgtgtgccattcagtgaaagtgtc

SEQ ID NO: 39555 - DNA, 381 bp, Muscodor strobelii
  misc_feature: SGI cDNA ID NO. 573766
  misc_feature: Encodes the peptide sequence at SEQ ID NO 39556
atgctcgtgccattgagagcctccgctgcccgctccctctcggccgtcacccgcgtcgcgagggtcaacgccgtcaggaccttcatcgccccgactgtgtcccgacgagccgacttcgtccaggagctctacctcaaagaactcaaggcctacaagcccaccccgatcaaggactccgacagcgtcggccacgtccagaccttcaccgccccgaaggctcccaagtcccccgaggaggccgacctcgccaacagcctgaaggagtacgagagcatggccgtcgaggtcgagggcagcgagggcgccgccgcctcttccaccccggccgccgtcgaggactggcttgttgaggaggacgacgccgaggacgcccaccactag

SEQ ID NO: 39556 - protein, 126 aa, Muscodor strobelii
  misc_feature: SGI Peptide ID NO. 573766
  misc_feature (6)..(126): NCBI GI: 116181540 Blast Desc: CHGG_01398 [Chaetomium globosum CBS 148.51] gi|88185695|gb|EAQ93163.1| CHGG_01398 [Chaetomium globosum CBS 148.51]
  misc_feature (6)..(126): NCBI GI: 171687257 Blast Desc: protein product [Podospora anserina] gi|170943590|emb|CAP69242.1| protein product [Podospora anserina]
  misc_feature (11)..(126): NCBI GI: 145613936 Blast Desc: MGG_11251 [Magnaporthe grisea 70-15] gi|145616656|ref|XP_001402554.1| MGG_01250 [Magnaporthe grisea 70-15] gi|145009204|gb|EDJ93915.1| MGG_01250 [Magnaporthe grisea
  misc_feature (25)..(126): NCBI GI: 85117672 Blast Desc: NCU03199 [Neurospora crassa OR74A] gi|28927106|gb|EAA36063.1| conserved [Neurospora crassa OR74A]
  misc_feature (1)..(126): NCBI GI: 46107176 Blast Desc: FG00471.1 [Gibberella zeae PH-1]
  misc_feature (1)..(126): NCBI GI: 261356348 Blast Desc: ATP synthase H chain [Verticillium albo-atrum VaMs.102]
  misc_feature (1)..(115): NCBI GI: 256735263 Blast Desc: [Nectria haematococca mpVI 77-13-4]
  misc_feature (12)..(121): NCBI GI: 189204390 Blast Desc: conserved [Pyrenophora tritici-repentis Pt-1C-BFP] gi|187985629|gb|EDU51117.1| conserved [Pyrenophora tritici-repentis Pt-1C-BFP]
  misc_feature (12)..(126): NCBI GI: 156062026 Blast Desc: ATP synthase H chain, mitochondrial precursor [Sclerotinia sclerotiorum 1980] gi|154696465|gb|EDN96203.1| ATP synthase H chain, mitochondrial precursor [Sclerotinia 1980]
  misc_feature (12)..(126): NCBI GI: 154292118 Blast Desc: BC1G_14868 [Botryotinia fuckeliana B05.10] gi|150846295|gb|EDN21488.1| BC1G_14868 [Botryotinia fuckeliana B05.10]
MLVPLRASAARSLSAVTRVARVNAVRTFIAPTVSRRADFVQELYLKELKAYKPTPIKDSDSVGHVQTFTAPKAPKSPEEADLANSLKEYESMAVEVEGSEGAAASSTPAAVEDWLVEEDDAEDAHH

SEQ ID NO: 39557 - DNA, 796 bp, Muscodor strobelii
  misc_feature: SGI EST ID NO. CUFF.95351.0
  misc_feature: Variant of the nucleotide sequence at SEQ ID NO 39555
cgaggagtctcgcaattgacgacgaaaaatccacgcaacctgcaactacctgtcatcgacatcaccacccatccacacccgggccatcctcaatccgacagaatgctcgtgccattgagagcctccgctgcccgctccctctcggccgtcacccgcgtcgcgagggtcaacgccgtcaggaccttcatcgccccgactgtgtcccgacgagccgacttcgtccaggagctctacctcaaagaactcaaggcctacaagcccaccccgatcaaggactccgacagcgtcggccacgtccagaccttcaccgccccgaaggctcccaagtcccccgaggaggccgacctcgccaacagcctgaaggagtacgagagcatggccgtcgaggtcgagggcagcgagggcgccgccgcctcttccaccccggccgccgtcgaggactggcttgttgaggaggacgacgccgaggacgcccaccactagaccatgtgcgccgagaccgatcgctaccatttgtgagttgtcagttgtgtggatggcaacgcttgtggtgtggcggggagtacagcgacaaggagcgttgcagccgcgccgggaatgactgctggcagtggtggagactacctatccatctacgacacgcccgacttgaaggggtgcggatggtgtaatccgtgtgtatatttatgactaccatatctacctagtggtgtccagtcaacaaaaagacattgcattcgtctgttccaaccaagacaaattctctccctctccctctacctctccctttccctcc

SEQ ID NO: 39558 - DNA, 405 bp, Muscodor strobelii
  misc_feature: SGI cDNA ID NO. 573767
  misc_feature: Encodes the peptide sequence at SEQ ID NO 39559
atgctcgtgccattgagagcctccctaactgagtcgacgctgctgcaggctgcccgctccctctcggccgtcacccgcgtcgcgagggtcaacgccgtcaggaccttcatcgccccgactgtgtcccgacgagccgacttcgtccaggagctctacctcaaagaactcaaggcctacaagcccaccccgatcaaggactccgacagcgtcggccacgtccagaccttcaccgccccgaaggctcccaagtcccccgaggaggccgacctcgccaacagcctgaaggagtacgagagcatggccgtcgaggtcgagggcagcgagggcgccgccgcctcttccaccccggccgccgtcgaggactggcttgttgaggaggacgacgccgaggacgcccaccactag

SEQ ID NO: 39559 - protein, 134 aa, Muscodor strobelii
  misc_feature: SGI Peptide ID NO. 573767
  misc_feature (17)..(134): NCBI GI: 116181540 Blast Desc: CHGG_01398 [Chaetomium globosum CBS 148.51] gi|88185695|gb|EAQ93163.1| CHGG_01398 [Chaetomium globosum CBS 148.51]
  misc_feature (19)..(134): NCBI GI: 171687257 Blast Desc: protein product [Podospora anserina] gi|170943590|emb|CAP69242.1| protein product [Podospora anserina]
  misc_feature (19)..(134): NCBI GI: 145613936 Blast Desc: MGG_11251 [Magnaporthe grisea 70-15] gi|145616656|ref|XP_001402554.1| MGG_01250 [Magnaporthe grisea 70-15] gi|145009204|gb|EDJ93915.1| MGG_01250 [Magnaporthe grisea
  misc_feature (33)..(134): NCBI GI: 85117672 Blast Desc: NCU03199 [Neurospora crassa OR74A] gi|28927106|gb|EAA36063.1| conserved [Neurospora crassa OR74A]
  misc_feature (14)..(134): NCBI GI: 261356348 Blast Desc: ATP synthase H chain [Verticillium albo-atrum VaMs.102]
  misc_feature (1)..(134): NCBI GI: 46107176 Blast Desc: FG00471.1 [Gibberella zeae PH-1]
  misc_feature (9)..(123): NCBI GI: 256735263 Blast Desc: [Nectria haematococca mpVI 77-13-4]
  misc_feature (20)..(129): NCBI GI: 189204390 Blast Desc: conserved [Pyrenophora tritici-repentis Pt-1C-BFP] gi|187985629|gb|EDU51117.1| conserved [Pyrenophora tritici-repentis Pt-1C-BFP]
  misc_feature (20)..(134): NCBI GI: 156062026 Blast Desc: ATP synthase H chain, mitochondrial precursor [Sclerotinia sclerotiorum 1980] gi|154696465|gb|EDN96203.1| ATP synthase H chain, mitochondrial precursor [Sclerotinia 1980]
  misc_feature (2)..(133): NCBI GI: 258563758 Blast Desc: conserved [Uncinocarpus reesii 1704] gi|237908131|gb|EEP82532.1| conserved [Uncinocarpus reesii 1704]
MLVPLRASLTESTLLQAARSLSAVTRVARVNAVRTFIAPTVSRRADFVQELYLKELKAYKPTPIKDSDSVGHVQTFTAPKAPKSPEEADLANSLKEYESMAVEVEGSEGAAASSTPAAVEDWLVEEDDAEDAHH

SEQ ID NO: 39560 - DNA, 796 bp, Muscodor strobelii; identical to SEQ ID NO: 39557
  misc_feature: SGI EST ID NO. CUFF.95351.0
  misc_feature: Variant of the nucleotide sequence at SEQ ID NO 39558

SEQ ID NO: 39561 - DNA, 2709 bp, Muscodor strobelii
  misc_feature: SGI cDNA ID NO. 573768
  misc_feature: Reduced expression when VOC is produced
  misc_feature: Encodes the peptide sequence at SEQ ID NO 39562
atgactcaatttaactttttgaacagaacttctccggcagatgacgactccgaccagataggctacgacactccccggtctggcattgcgacgccccagccggacctcaaggacaaacgactgccgggtatcatgagctactttggccaggttcgttccgcccctttgtcttcgatgtttccttcttcacgctcctctgcccagggatatgacactgagacatcgtgtcccaccacgccacagcaagagtcggaaacaagaaggaatgcagaagaacagacatgcaccccaaccctcgacgtagccaaagaccatacacccgatgcttcacctcccctatcccaagagaccagggagtcttcggaacgagtgccgtctctcaaagaagcaacacattctttcaacccataccccacccctccttgctcgaagacaccgtcggtaaagggtctgagttcgagtgatgcgagcgtcgaagcagggctagaatcctcggcctctccgcccactcggccctctataagcacagtcagcacaagcgcttcaggcctcttgcctcagagactccgcagggccacgctagcatcgcccgtcacgagcatcgttactaccagtagcgtgcttacgggtcgctcctctggtcctggtggcaataacgctgcatcaactacaccaagctctcctctagactccagtacaccagaaggcgatggggtttcttatttcactgcagagtccgaccccttggataagttaagaaggctaacacttttaaccccccaaaagagcggaccacccactcctacgagagcactctccgccgcccagccatctcctgccgaagctcgatcatccttcaggacgagcggagatggcactgctgccaacagtcgacgaccctctacaacccaaaacactggtgcgcaaccaccctcgcacaaaggtcggttgactatcaaaatcctagagggtcgcggtctacgcaaaagcagggacccatatgttgtggctgtgttccaaaggagcgaattgatatcgcccggcccaaggacatttgaggacgaggacgatgtcgccatcccgaccagtattcacatgggcggcattcccatatctcgccaaggcagcgactcaggccgtcctatggctataccaatgcgcagccgccagagcagcaacaccagtatctcagattacactgctttcagaaaccgcacacgaagatctttcacgagcccaaagtgggatgccgaagccgtcttcgatgtagttgactcggatatgctggttgatatttcagtgtacgatcacgggtccgccggcgaagagttccttggtcatgttgatttccaggctattactccaggaaaagacgagccagttcgtggatggttccctctaagtggcaacgccgacactacaatagataaggagcccacgggcgaaatttacgttgaggcattctaccagagaactgaaaagaaacactacgggcccgatgattttcagatcctacgtttgattggcaagggcacattcggccaggtataccaagtacggaaaaaggatactggtcgcatatatgccatgaaagttctgtccaaaaaggtaattgtgcagaagaaagaggttgcgcataccgtcggggagcggaacattctggtccggactgccacgtctgagtcaccattcatcgtggggctgaagttctcgtttcagactcagaatgatctcttcctggtgactgattacatgtccggcggcgagttgttttggcatctccaaaaggagggtcgatttgacgagaagcgcgccaaattctacatcgcagagttgattcttgcgattcagcaccttcatcacaacgacattgtgtaccgcgatctcaaaccggagaacatcttactcgatgccaatggacacattgctctttgcgacttcggattatcaaaagccaacctgaccaaaaacgacacgactaacacgttttgcggaacgacagaatatctagcccccgaggtacttcttgacgagtccggttatactaaaatggtcgacttttggtcacttggtgtgctagtcttcgaaatgtgctgtggctggagcccgttctatgccgaagacacccagcagatgtataagaacattgcgtttggtaaagttcgctttccgagagatacgctgtctcaggagggcagaaacttcgtcaaagggctactgaaccgaaacccaaagcatcgcctgggagctgttgacgatgctgaagagttgaagcgccacaacttctttgccgatattgattgggactctcttatgaaaaaggtcatcacaccacctttcaaacccaagttgaagtcggagacggacgtgtcgtacttcgatcccgaattcacgaacgctcttaacacgaacggctcgttgaatgagcgggctcaacagctggcagctggtttcgccacctccacgccactttctcctaccacacaagccaacttcaaagggttcacttatgtggatgagagtgcgctagatgatcacatgagaggacgatacgatcatcggatggaagacgaagacatgagcgacgcggatcatcgagataacgactgggatgatcttgaggatttagatcttcggaaagcgaaccgcatgagtggtattgtgaagggccagcaaacagaagagcctttccaacagttcgacatgtaa

SEQ ID NO: 39562 - protein, 902 aa, Muscodor strobelii
  misc_feature: SGI Peptide ID NO. 573768
  misc_feature (783)..(841): Pfam Id: PF00433 Pfam Desc: Protein kinase C terminal domain
  misc_feature (502)..(763): Pfam Id: PF00069 Pfam Desc: Protein kinase domain
  misc_feature (407)..(449): Pfam Id: PF00168 Pfam Desc: C2 domain
  misc_feature (633)..(716): Pfam Id: PF07714 Pfam Desc: Protein tyrosine kinase
  misc_feature (14)..(889): NCBI GI: 240108365 Blast Desc: Serine/threonine protein kinase, [Coccidioides posadasii C735 delta SOWgp]
  misc_feature (15)..(895): NCBI GI: 239606939 Blast Desc: serine/threonine-protein kinase sck1 [Ajellomyces dermatitidis ER-3]
  misc_feature (15)..(896): NCBI GI: 225556571 Blast Desc: serine/threonine-protein kinase sck1 [Ajellomyces capsulatus G186AR]
  misc_feature (14)..(891): NCBI GI: 258563628 Blast Desc: serine/threonine-protein kinase SCH9 [Uncinocarpus reesii 1704] gi|237908066|gb|EEP82467.1| serine/threonine-protein kinase SCH9 [Uncinocarpus reesii 1704]
  misc_feature (27)..(902): NCBI GI: 212526936 Blast Desc: cAMP-dependent protein kinase-like, [Penicillium marneffei ATCC 18224] gi|210073023|gb|EEA27110.1| cAMP-dependent protein kinase-like, [Penicillium marneffei ATCC 18224]
  misc_feature (1)..(902): NCBI GI: 242782167 Blast Desc: cAMP-dependent protein kinase-like, [Talaromyces stipitatus ATCC 10500] gi|218720093|gb|EED19512.1| cAMP-dependent protein kinase-like, [Talaromyces stipitatus ATCC 10500]
  misc_feature (14)..(896): NCBI GI: 169768980 Blast Desc: [Aspergillus oryzae RIB40] gi|83766818|dbj|BAE56958.1| protein product [Aspergillus oryzae]
  misc_feature (14)..(896): NCBI GI: 119496505 Blast Desc: cAMP-dependent protein kinase, [Neosartorya fischeri NRRL 181] gi|119413188|gb|EAW23129.1| cAMP-dependent protein kinase, [Neosartorya fischeri NRRL 181]
  misc_feature (14)..(902): NCBI GI: 67527996 Blast Desc: AN4238.2 [Aspergillus nidulans FGSC A4] gi|21326184|gb|AAK71879.1| cAMP-dependent protein kinase-like [Emericella nidulans] gi|40740147|gb|EAA59337.1| AN4238.2 FGSC ;
  misc_feature (125)..(896): NCBI GI: 225681653 Blast Desc: serine/threonine-protein kinase SCH9 [Paracoccidioides brasiliensis Pb03]
  misc_feature: Useful for introducing or modulating the production of volatile compounds
MTQFNFLNRTSPADDDSDQIGYDTPRSGIATPQPDLKDKRLPGIMSYFGQVRSAPLSSMFPSSRSSAQGYDTETSCPTTPQQESETRRNAEEQTCTPTLDVAKDHTPDASPPLSQETRESSERVPSLKEATHSFNPYPTPPCSKTPSVKGLSSSDASVEAGLESSASPPTRPSISTVSTSASGLLPQRLRRATLASPVTSIVTTSSVLTGRSSGPGGNNAASTTPSSPLDSSTPEGDGVSYFTAESDPLDKLRRLTLLTPQKSGPPTPTRALSAAQPSPAEARSSFRTSGDGTAANSRRPSTTQNTGAQPPSHKGRLTIKILEGRGLRKSRDPYVVAVFQRSELISPGPRTFEDEDDVAIPTSIHMGGIPISRQGSDSGRPMAIPMRSRQSSNTSISDYTAFRNRTRRSFTSPKWDAEAVFDVVDSDMLVDISVYDHGSAGEEFLGHVDFQAITPGKDEPVRGWFPLSGNADTTIDKEPTGEIYVEAFYQRTEKKHYGPDDFQILRLIGKGTFGQVYQVRKKDTGRIYAMKVLSKKVIVQKKEVAHTVGERNILVRTATSESPFIVGLKFSFQTQNDLFLVTDYMSGGELFWHLQKEGRFDEKRAKFYIAELILAIQHLHHNDIVYRDLKPENILLDANGHIALCDFGLSKANLTKNDTTNTFCGTTEYLAPEVLLDESGYTKMVDFWSLGVLVFEMCCGWSPFYAEDTQQMYKNIAFGKVRFPRDTLSQEGRNFVKGLLNRNPKHRLGAVDDAEELKRHNFFADIDWDSLMKKVITPPFKPKLKSETDVSYFDPEFTNALNTNGSLNERAQQLAAGFATSTPLSPTTQANFKGFTYVDESALDDHMRGRYDHRMEDEDMSDADHRDNDWDDLEDLDLRKANRMSGIVKGQQTEEPFQQFDM

SEQ ID NO: 39563 - DNA, 5304 bp, Muscodor strobelii
  misc_feature: SGI EST ID NO. CUFF.95873.3
  misc_feature: Variant of the nucleotide sequence at SEQ ID NO 39561
tcgacttcgtgggatatctagatggtgtgcagcgtatcataatgttaatcatgtttgctttttacccttcgaataattataaaactctctaacagggctagtacctttcaataaaagcttgcaactttgatccccgagtccccaccgaggtcccaaatgcaacctaggcaagccctgaggattgtgacatttgagatcgccaccgagattatctcgacattcattaagcatttccgacctctagtgagattggggagatcaaggcgatttaagtcgcttccaggttgacgagcagacgagtaggtaggacctgtcaaacctgcttgctcgtaatacctggtaagagagagatacgcagctccaggaggcaacctgaagattaggtaccacgctgctatctggcctccggctctcgccagcttttgggtctcacctcagatgggtccagtcaactgcacctgaatcccacttagccccaacgcctgaacaccatctgcgtctctccagacacatcattaattcagctatcctccttcttctctaattctttaacctaccttaccgaccccgacctatagtagaattgtgtaggtaggtggcatcacctccattcccctctccgccactctgcagctctgccaggataactgtgcaattcgcagtgccatctccagtagcgggaggtattccgccgggcataccttaagctgcggcggccgacctcatagcaccactaccttgcccagcatacactcttctccaccagcactgcgcccgcaacacccccacgcacccatccgtctgaacttgcctaccaaacaaattccagtcacctccccctctattagcacgggctggcatatctaacctttgaagcccacgacactctccagcacctacagatacaccatcgccaaccagcatcaacgacaacatatcctacgtctagcgcgcacaacccgcgcggcttgagcatctcgccccgaatcgccatcgtcggcggaaggacataccaccatggcgacttccgagggaggcttcgacctgcttcggcgcgccacgcaggccatgatgtcaaagtaagtaaccgggttccttatttcatcgctgttatccctacagctgtttttgcgcattggcacactggcacactggcacactgggacattggcacctctacccctccgagctcctgcctgcttcctactcccctagcatgggagagcactgcgcacgcaacatactatttgggctctgtgtggtctggtgacacatggatgttgcggtctacctgcgtcgagcagtcgagtttgcagttacattgcgcgcacagcagagcccctcttcgagtgctatctcttctcttccctccgcccatggtgcttttgcacatgtccattactaccctggtcaaccaagaaacccctcctccttacctggtattttccggcggtcgaccgactgctgcccttaactcgcaactgcggggcgcggcgcttgcttcccaagggccgtgtactgtactctacacttgtgccaaaaatcatctggcggtcgagagtcatggagaggacggccagcgacgagtctagcactaagacgagcacggtggcctatggcgacatttcagcaatttgaatcctggccgtccgctccgactctgtccgtgctcgaaagccgaacgtacgatccatcagtgtcccctgcttacagacaccatggatgctcctcggccatatatcaatacctcacgatcaacactcgccgcagctgccgcggagccttcagtcatgaggcatggtgaagcgttggtaatgtattgctctgttggggctcggtagacacgccctgggcgagctggatcggcaaactggtgcaactgcgcgaaaatggctcggcacctagcgaacgagcggtggtgacgcagtgctatggccagctatcgctgtcgcggcctgactcgctagaacccggaccgaacagcagcccaataggctgggctctagggtcttgcatccgccccactctcgggctgacgatggctctgcccgtctgctgcgaatagccaaaacagcacccccaagactccaaggcgccctgtgccgccccaccggcccttctccgaccacatggcagcatgcctgcaacttgctcgcctggtgtcatgcctggggccatgcctggggccattcgtgggtgccaccggcgactccttgatgaccaacgcccaagcccaagggacattgccgcacggggctcgctcgacaaatgacaattcgcctgtcgagttttggtctctttgccggctagccctccagcttctgccgtcgccaattacgccgactgcttcttgtctcctcatgccactttgccctacaagccgtgcgcagttcagatgcaattctgctctgcatttcctgtccacctctgctgaggccgctctactcctacaccacaatcatgactcggctgccttgatctagtactcgttaatgttttcaatcttcttcccagtctatcttttattgacgcactcgaacgcggacttccacgatgactcaatttaactttttgaacagaacttctccggcagatgacgactccgaccagataggctacgacactccccggtctggcattgcgacgccccagccggacctcaaggacaaacgactgccgggtatcatgagctactttggccagagcggaccacccactcctacgagagcactctccgccgcccagccatctcctgccgaagctcgatcatccttcaggacgagcggagatggcactgctgccaacagtcgacgaccctctacaacccaaaacactggtgcgcaaccaccctcgcacaaaggtcggttgactatcaaaatcctagagggtcgcggtctacgcaaaagcagggacccatatgttgtggctgtgttccaaaggagcgaattgatatcgcccggcccaaggacatttgaggacgaggacgatgtcgccatcccgaccagtattcacatgggcggcattcccatatctcgccaaggcagcgactcaggccgtcctatggctataccaatgcgcagccgccagagcagcaacaccagtatctcagattacactgctttcagaaaccgcacacgaagatctttcacgagcccaaagtgggatgccgaagccgtcttcgatgtagttgactcggatatgctggttgatatttcagtgtacgatcacgggtccgccggcgaagagttccttggtcatgttgatttccaggctattactccaggaaaagacgagccagttcgtggatggttccctctaagtggcaacgccgacactacaatagataaggagcccacgggcgaaatttacgttgaggcattctaccagagaactgaaaagaaacactacgggcccgatgattttcagatcctacgtttgattggcaagggcacattcggccaggtataccaagtacggaaaaaggatactggtcgcatatatgccatgaaagttctgtccaaaaaggtaattgtgcagaagaaagaggttgcgcataccgtcggggagcggaacattctggtccggactgccacgtctgagtcaccattcatcgtggggctgaagttctcgtttcagactcagaatgatctcttcctggtgactgattacatgtccggcggcgagttgttttggcatctccaaaaggagggtcgatttgacgagaagcgcgccaaattctacatcgcagagttgattcttgcgattcagcaccttcatcacaacgacattgtgtaccgcgatctcaaaccggagaacatcttactcgatgccaatggacacattgctctttgcgacttcggattatcaaaagccaacctgaccaaaaacgacacgactaacacgttttgcggaacgacagaatatctagcccccgaggtacttcttgacgagtccggttatactaaaatggtcgacttttggtcacttggtgtgctagtcttcgaaatgtgctgtggctggagcccgttctatgccgaagacacccagcagatgtataagaacattgcgtttggtaaagttcgctttccgagagatacgctgtctcaggagggcagaaacttcgtcaaagggctactgaaccgaaacccaaagcatcgcctgggagctgttgacgatgctgaagagttgaagcgccacaacttctttgccgatattgattgggactctcttatgaaaaaggtcatcacaccacctttcaaacccaagttgaagtcggagacggacgtgtcgtacttcgatcccgaattcacgaacgctcttaacacgaacggctcgttgaatgagcgggctcaacagctggcagctggtttcgccacctccacgccactttctcctaccacacaagccaacttcaaagggttcacttatgtggatgagagtgcgctagatgatcacatgagaggacgatacgatcatcggatggaagacgaagacatgagcgacgcggatcatcgagataacgactgggatgatcttgaggatttagatcttcggaaagcgaaccgcatgagtggtattgtgaagggccagcaaacagaagagcctttccaacagttcgacatgtaacatggactttcaattcgaagtgcatgatccaaatgattgcgctattcctccatcatcatgaacacatggtattctttcgggtttcatttgcgcaagggaactgtattcacaacgggcatcattgcatagggcgatagtttattgcatgacggccatggccattcaaaatctgggccacggtcgatatggaaggtcacgggggcgtttggttgttgcaaatagtgaaggaattctagcacatacatacagaggctttcaaaagccgccataattgcacggtcacatcaagggctctggaagtaggcgctgtcatttccttgtttgggaaaacgaagctttggaaaactgttcctgccaaataccgtacacgagaaggtcatggcttcaggctcgatcggtcaggaatagcgggattctggcgtggctgttcttgttccagctagcgaccgaaggaagacaatagaaaggagaagaggggggaaacacagatgctgcgctgccttaagtacttccagatgcttgaagggaatgatgtacgtatttcgacttggtgctcaaaataaatcgtgactcttgaggtagtatataagcaaaacgctaccataaattgcttcctcggtattctatagcgaagcataatggcatacccaatgtgctgtgcaactaatgtcattgggg

SEQ ID NO: 39564 - DNA, 2745 bp, Muscodor strobelii
  misc_feature: SGI cDNA ID NO. 573769
  misc_feature: Reduced expression when VOC is produced
  misc_feature: Encodes the peptide sequence at SEQ ID NO 39565
atggcgacttccgagggaggcttcgacctgcttcggcgcgccacgcaggccatgatgtcaaaaacttctccggcagatgacgactccgaccagataggctacgacactccccggtctggcattgcgacgccccagccggacctcaaggacaaacgactgccgggtatcatgagctactttggccaggttcgttccgcccctttgtcttcgatgtttccttcttcacgctcctctgcccagggatatgacactgagacatcgtgtcccaccacgccacagcaagagtcggaaacaagaaggaatgcagaagaacagacatgcaccccaaccctcgacgtagccaaagaccatacacccgatgcttcacctcccctatcccaagagaccagggagtcttcggaacgagtgccgtctctcaaagaagcaacacattctttcaacccataccccacccctccttgctcgaagacaccgtcggtaaagggtctgagttcgagtgatgcgagcgtcgaagcagggctagaatcctcggcctctccgcccactcggccctctataagcacagtcagcacaagcgcttcaggcctcttgcctcagagactccgcagggccacgctagcatcgcccgtcacgagcatcgttactaccagtagcgtgcttacgggtcgctcctctggtcctggtggcaataacgctgcatcaactacaccaagctctcctctagactccagtacaccagaaggcgatggggtttcttatttcactgcagagtccgaccccttggataagttaagaaggctaacacttttaaccccccaaaagagcggaccacccactcctacgagagcactctccgccgcccagccatctcctgccgaagctcgatcatccttcaggacgagcggagatggcactgctgccaacagtcgacgaccctctacaacccaaaacactggtgcgcaaccaccctcgcacaaaggtcggttgactatcaaaatcctagagggtcgcggtctacgcaaaagcagggacccatatgttgtggctgtgttccaaaggagcgaattgatatcgcccggcccaaggacatttgaggacgaggacgatgtcgccatcccgaccagtattcacatgggcggcattcccatatctcgccaaggcagcgactcaggccgtcctatggctataccaatgcgcagccgccagagcagcaacaccagtatctcagattacactgctttcagaaaccgcacacgaagatctttcacgagcccaaagtgggatgccgaagccgtcttcgatgtagttgactcggatatgctggttgatatttcagtgtacgatcacgggtccgccggcgaagagttccttggtcatgttgatttccaggctattactccaggaaaagacgagccagttcgtggatggttccctctaagtggcaacgccgacactacaatagataaggagcccacgggcgaaatttacgttgaggcattctaccagagaactgaaaagaaacactacgggcccgatgattttcagatcctacgtttgattggcaagggcacattcggccaggtataccaagtacggaaaaaggatactggtcgcatatatgccatgaaagttctgtccaaaaaggtaattgtgcagaagaaagaggttgcgcataccgtcggggagcggaacattctggtccggactgccacgtctgagtcaccattcatcgtggggctgaagttctcgtttcagactcagaatgatctcttcctggtgactgattacatgtccggcggcgagttgttttggcatctccaaaaggagggtcgatttgacgagaagcgcgccaaattctacatcgcagagttgattcttgcgattcagcaccttcatcacaacgacattgtgtaccgcgatctcaaaccggagaacatcttactcgatgccaatggacacattgctctttgcgacttcggattatcaaaagccaacctgaccaaaaacgacacgactaacacgttttgcggaacgacagaatatctagcccccgaggtacttcttgacgagtccggttatactaaaatggtcgacttttggtcacttggtgtgctagtcttcgaaatgtgctgtggctggagcccgttctatgccgaagacacccagcagatgtataagaacattgcgtttggtaaagttcgctttccgagagatacgctgtctcaggagggcagaaacttcgtcaaagggctactgaaccgaaacccaaagcatcgcctgggagctgttgacgatgctgaagagttgaagcgccacaacttctttgccgatattgattgggactctcttatgaaaaaggtcatcacaccacctttcaaacccaagttgaagtcggagacggacgtgtcgtacttcgatcccgaattcacgaacgctcttaacacgaacggctcgttgaatgagcgggctcaacagctggcagctggtttcgccacctccacgccactttctcctaccacacaagccaacttcaaagggttcacttatgtggatgagagtgcgctagatgatcacatgagaggacgatacgatcatcggatggaagacgaagacatgagcgacgcggatcatcgagataacgactgggatgatcttgaggatttagatcttcggaaagcgaaccgcatgagtggtattgtgaagggccagcaaacagaagagcctttccaacagttcgacatgtaa

SEQ ID NO: 39565 - protein, 914 aa, Muscodor strobelii
  misc_feature: SGI Peptide ID NO. 573769
  misc_feature (795)..(853): Pfam Id: PF00433 Pfam Desc: Protein kinase C terminal domain
  misc_feature (514)..(775): Pfam Id: PF00069 Pfam Desc: Protein kinase domain
  misc_feature (419)..(461): Pfam Id: PF00168 Pfam Desc: C2 domain
  misc_feature (645)..(728): Pfam Id: PF07714 Pfam Desc: Protein tyrosine kinase
  misc_feature (26)..(907): NCBI GI: 85117676 Blast Desc: serine/threonine-protein kinase sck1 [Neurospora crassa OR74A] gi|28927107|gb|EAA36064.1| serine/threonine-protein kinase sck1 [Neurospora crassa OR74A]
  misc_feature (31)..(914): NCBI GI: 171687255 Blast Desc: protein product [Podospora anserina] gi|170943589|emb|CAP69241.1| protein product [Podospora anserina]
  misc_feature (20)..(907): NCBI GI: 256734550 Blast Desc: NECHADRAFT_65669 [Nectria haematococca mpVI 77-13-4]
  misc_feature (26)..(907): NCBI GI: 46107178 Blast Desc: FG00472.1 [Gibberella zeae PH-1]
  misc_feature (274)..(914): NCBI GI: 116181542 Blast Desc: CHGG_01399 [Chaetomium globosum CBS 148.51] gi|88185696|gb|EAQ93164.1| CHGG_01399 [Chaetomium globosum CBS 148.51]
  misc_feature (16)..(907): NCBI GI: 154292128 Blast Desc: BC1G_14873 [Botryotinia fuckeliana B05.10] gi|150846300|gb|EDN21493.1| BC1G_14873 [Botryotinia fuckeliana B05.10]
  misc_feature (26)..(914): NCBI GI: 145616654 Blast Desc: MGG_01251 [Magnaporthe grisea 70-15] gi|145009203|gb|EDJ93914.1| MGG_01251 [Magnaporthe grisea 70-15]
  misc_feature (22)..(907): NCBI GI: 9844082 Blast Desc: cAMP-dependent protein kinase catalytic subunit [Botryotinia fuckeliana]
  misc_feature (241)..(907): NCBI GI: 156062020 Blast Desc: SS1G_01124 [Sclerotinia sclerotiorum 1980] gi|154696462|gb|EDN96200.1| SS1G_01124 [Sclerotinia sclerotiorum 1980]
  misc_feature (1)..(907): NCBI GI: 261194162 Blast Desc: serine/threonine-protein kinase sck1 [Ajellomyces dermatitidis SLH14081] gi|239588500|gb|EEQ71143.1| serine/threonine-protein kinase sck1 [Ajellomyces dermatitidis
  misc_feature: Useful for introducing or modulating the production of volatile compounds
MATSEGGFDLLRRATQAMMSKTSPADDDSDQIGYDTPRSGIATPQPDLKDKRLPGIMSYFGQVRSAPLSSMFPSSRSSAQGYDTETSCPTTPQQESETRRNAEEQTCTPTLDVAKDHTPDASPPLSQETRESSERVPSLKEATHSFNPYPTPPCSKTPSVKGLSSSDASVEAGLESSASPPTRPSISTVSTSASGLLPQRLRRATLASPVTSIVTTSSVLTGRSSGPGGNNAASTTPSSPLDSSTPEGDGVSYFTAESDPLDKLRRLTLLTPQKSGPPTPTRALSAAQPSPAEARSSFRTSGDGTAANSRRPSTTQNTGAQPPSHKGRLTIKILEGRGLRKSRDPYVVAVFQRSELISPGPRTFEDEDDVAIPTSIHMGGIPISRQGSDSGRPMAIPMRSRQSSNTSISDYTAFRNRTRRSFTSPKWDAEAVFDVVDSDMLVDISVYDHGSAGEEFLGHVDFQAITPGKDEPVRGWFPLSGNADTTIDKEPTGEIYVEAFYQRTEKKHYGPDDFQILRLIGKGTFGQVYQVRKKDTGRIYAMKVLSKKVIVQKKEVAHTVGERNILVRTATSESPFIVGLKFSFQTQNDLFLVTDYMSGGELFWHLQKEGRFDEKRAKFYIAELILAIQHLHHNDIVYRDLKPENILLDANGHIALCDFGLSKANLTKNDTTNTFCGTTEYLAPEVLLDESGYTKMVDFWSLGVLVFEMCCGWSPFYAEDTQQMYKNIAFGKVRFPRDTLSQEGRNFVKGLLNRNPKHRLGAVDDAEELKRHNFFADIDWDSLMKKVITPPFKPKLKSETDVSYFDPEFTNALNTNGSLNERAQQLAAGFATSTPLSPTTQANFKGFTYVDESALDDHMRGRYDHRMEDEDMSDADHRDNDWDDLEDLDLRKANRMSGIVKGQQTEEPFQQFDM

SEQ ID NO: 39566 - DNA, 5304 bp, Muscodor strobelii; identical to SEQ ID NO: 39563
  misc_feature: SGI EST ID NO. CUFF.95873.3
  misc_feature: Variant of the nucleotide sequence at SEQ ID NO 39564

SEQ ID NO: 39567 - DNA, 507 bp, Muscodor strobelii
  misc_feature: SGI cDNA ID NO. 573770
  misc_feature: Reduced expression when VOC is produced
  misc_feature: Encodes the peptide sequence at SEQ ID NO 39568
atggatgctgtctcatcttacagctttgcttcgggcggctggctgacgatacaagcaatcccactaatcgtctggccatcagcgatcaacagcctcctcaccgtagatgagcatccaggaagtctaggatatggagctagcgcagtcgaaaactatctcgcccgtagtctgggcttcgcattgctcaccctgggtctcgtcaccgtggtgctttccggcagcgtcccggttggagcagtggacacgccggacgatgccctttcaccatatgcagcgcccgtcctcctcctcacgacgttacaccacgcaagctgcgcgttctactcgtgggcgcgttacaactccactggcgagatgggcttcatgcttgggttcatgggaagtgcagggatggctgcttttggaacgtggtgtctgctctttggtggcgagaaggcgagaatcagcaggacgggcaaggataagagaacgagtcagcttttgttcaaggataagaggaggagatga

SEQ ID NO: 39568 - protein, 168 aa, Muscodor strobelii
  misc_feature: SGI Peptide ID NO. 573770
  misc_feature (2)..(164): NCBI GI: 85117696 Blast Desc: NCU03205 [Neurospora crassa OR74A] gi|28927112|gb|EAA36069.1| [Neurospora crassa OR74A]
  misc_feature (1)..(166): NCBI GI: 154318175 Blast Desc: BC1G_03255 [Botryotinia fuckeliana B05.10] gi|150842778|gb|EDN17971.1| BC1G_03255 [Botryotinia fuckeliana B05.10]
  misc_feature (1)..(167): NCBI GI: 261191799 Blast Desc: conserved [Ajellomyces dermatitidis SLH14081] gi|239589623|gb|EEQ72266.1| conserved [Ajellomyces dermatitidis SLH14081] gi|239608635|gb|EEQ85622.1| conserved [Ajellomyces
  misc_feature (1)..(166): NCBI GI: 156062170 Blast Desc: SS1G_01200 [Sclerotinia sclerotiorum 1980] gi|154696537|gb|EDN96275.1| SS1G_01200 [Sclerotinia sclerotiorum 1980]
  misc_feature (1)..(166): NCBI GI: 169607517 Blast Desc: SNOG_06817 [Phaeosphaeria nodorum SN15] gi|111064348|gb|EAT85468.1| SNOG_06817 [Phaeosphaeria nodorum SN15]
  misc_feature (1)..(167): NCBI GI: 189188982 Blast Desc: conserved [Pyrenophora tritici-repentis Pt-1C-BFP] gi|187972436|gb|EDU39935.1| conserved [Pyrenophora tritici-repentis Pt-1C-BFP]
  misc_feature (1)..(166): NCBI GI: 255947520 Blast Desc: Pc22g04900 [Penicillium chrysogenum Wisconsin 54-1255] gi|211591544|emb|CAP97778.1| Pc22g04900 [Penicillium chrysogenum Wisconsin 54-1255]
  misc_feature (1)..(164): NCBI GI: 226285206 Blast Desc: conserved [Paracoccidioides brasiliensis Pb01]
  misc_feature (1)..(166): NCBI GI: 238486108 Blast Desc: conserved [Aspergillus flavus NRRL3357] gi|220699171|gb|EED55510.1| conserved [Aspergillus flavus NRRL3357]
  misc_feature (1)..(166): NCBI GI: 242768707 Blast Desc: conserved [Talaromyces stipitatus ATCC 10500] gi|218724819|gb|EED24236.1| conserved [Talaromyces stipitatus ATCC 10500]
  misc_feature: Useful for introducing or modulating the production of volatile compounds
MDAVSSYSFASGGWLTIQAIPLIVWPSAINSLLTVDEHPGSLGYGASAVENYLARSLGFALLTLGLVTVVLSGSVPVGAVDTPDDALSPYAAPVLLLTTLHHASCAFYSWARYNSTGEMGFMLGFMGSAGMAAFGTWCLLFGGEKARISRTGKDKRTSQLLFKDKRRR

SEQ ID NO: 39569 - DNA, 4843 bp, Muscodor strobelii
  misc_feature: SGI EST ID NO. CUFF.96385.1
  misc_feature: Variant of the nucleotide sequence at SEQ ID NO 39567
gtcggcagggatcttaattatctaatcttcaacttcacttctacgtccaaattcaacttggaagtcttataattcaccggggcgcatataaatctgggctgacacattgctactactccccaaatactagacttgcatgtttgagacctacagctgggcctagcgggggggattttttacaaccccaaaaaggaggacaaaaataggctgtctagccagtgtgatagaactgagagagagccgcgcaatatctgttgtctagtgccgacttgtcttgttgacgaggtgtcagcaagcgataagctggtgagcatgtcttctagcggggccgggaaagtccctgacgcctgggacgatgaggattgggaggtccaagccgacaaagcagcagcatctcctgagcctgtcgccgaatcccagaccctgatgtcccgtgccgagcggttaatgcagcacaccgagtcgaataagaagctttggcagtcagccgaagcaccaccagaaccattccactacctggcagcgcgttccgacacgcctctgaccaccgacttcaaacctgctatgaaagtcctcagtcgtaaacctgtgccccaagtcatcaccacgcgagatcctctcaccggtgccgtctcccggcttaaggttcaggatgatgattctgacgaagagcagaagactgttcagctcacccccgaggagatccgtgcgaaacagcagcgcgaacgtgaggagaagcaacgcaagtatgaggaggtgagagccaagatatttgggacccagccagggccctctagatccaccaacaactccaaaccctcctcgggcgcctctacaccaggaaacggcacaccagcaaggatctcggctgattcccgcggctcccgaggccgtggtagaggagggcgtgctggcgtaagtcagcggcagactgacagccgaggaaacagtcggggagacggccgtagtgataatcagccgagttcggccggccaggaactcttcgacccgaactatgcgcccaaaccggggtttcagctggagagaaggggtggaggtcagggtacaccgccgctctcgggcagatctacaccacgtgacgaagatcaggctattcgttcaccaagaggcccatccgacgggaataatcgaggatttgctcgaagaggcaatcgcaaggcagattaagatttatttgtactatctaccagctaccagccaccaccgattttactggcgagctggacgaccctatccgtctcgctcgtcttgctcttgcccacatcgctgattacctcccggtatgtggtcgaaactagggtctttatatctatgcccgtcgccatgctccagtgtgccagggcatcttgaatggatgatggagaagtacagtcccgaatgtcttcatcctcggatcccgctttcatactggcacccttctcgcttttactctcgtcggctgagaagtaggcctcgtctacttcggcaagccacgacttctgctcctgaggaccagcttgggatgagtgtccttttcgctgaacgaccacagggtcatcaactttgacctgacctccgccattagtgcacccaccaggacaggccattacttcaacataagctaagtccatgctccgtgccttgctcgcacctcttctgctggccgcagtgacttttgagctgggcatgcgcgatggtctatctggtttcaggttccgaaccaaattctgaatgtttcgaaacccgtagtatcgcgccgctctgaatatcgtttcaccggatgccgatactaccgtatacttggcgacgtcggcattccggccggcttcggtgacaagccgcgatccagcatgccgagacatgatgtatttcaatgtgtaatgcagattcccgcctgatgtcccagcctcgggatttcgctgccctctttggccacaagggaaaagaagttcctgcaggaccgggtctacaaatgggatttgtgctgaaatgggtattgattctgtgggcaaactgaagaaatcaatgcccctagattccgtcagcatcaagatttccttactcgtgatgacacagtcaacatcgcggatgcctctccccgactgacctgatccgttccagacagagtcagtcagctcttcacggctggcttccaactttttatcgaaacaaggcataacgctgaggtgccatatccgatcagcggtaatgcccaggactcggctcagtgttgtcttgagcagcgtacccatcaaagcctgcggggatttaatcttggagatgtgtggcaacacatgtggatgtgtcttctcggcatagcacacccacccggggcagcttgatgttagtatcggcttagcgatgctactatcccccaagacttcttctgcgcccaggaggaggcatgcctcgcgtgttgcgttcgtgtctactacccacgtgaaagaattattccacttcccgccggccttcaacccatccgagcccgacaatagttgcgtaatcattgccccggcatcctgctcccttatgcccttgcccgcggtggcagcgagactggcgcgtgtttgaggcgatacactagcgacgaacaacttgctatcgggattgtccaagccctcaaccctcaatgagccatcggacccattgcgctccaagcgcaggccaggtgcttgatctagaaggctgagcagctcgttgtggctctgcagactgaccaggacagcctcagcagacgtcacgcaacctgagcatgctagacagtcggtgagggagatctgggcgggcgcgccggtggtagcggcaggctgctggccatcgaggatgacctcatgttccagaggttcgcttcctttctcgggcgtaggcgcgacgggcagtgtttcgacgggcttgatgcacgcgacaccaggcgagatgaagtcgttgagatcgtctgtggagaggatggcggacatgacgacgaagcgtcgaggaacgggccgaacacagagtgcccaggagggatgaggttaagtgttgaagcgggcgttgagggaatgcgacggtggtggcgtcgtttgtatgtcgaattcgctatttgcttcgcgacagataggtggggtggcgagcgacaaggtctagacggagggtttggatgtactttctcagtagcttgcgggaaccagcctctcggaacgcgtcccaatgattactattactgcctgtctacataagttgtgcctgtgcaaatgagcgagcgaaagatgatccggaatggaagctgcgaagttgggaattgctgaggcagtagatttgggtttgagctatgtagtttgtcgcaatggggggtcgatgctttgaaatgccacttttttagctggatgcgagatcggcaacagctttaggggtcctcctatcctggacctaccctctctagcctctgccgctgagcccataatgtgcgaataacctggataccgcccagcaacactgtacaatcccgttgagatgcggaaagcatgacgtcgtgtctaaatggcatgccggcaggtctttgcatcaagacgccggattatacatccagccccaagtcaacaacagaacagaaacagaacagatgcttgggggagctccaaacttcgtgatcaccataaatctcaagagcctcgttgtggttaggtaaactctaagattcaatcgctgccaatggatgctgtctcatcttacagctttgcttcgggcggctggctgacgatacaagcaatcccactaatcggtgagcctgtctctcactcttacacgtcgacgtcgtgcatctcgcgtccctactttactgccccagctttccaaagcatgtcgaagtagtagaattgacagctcgctcagtctggccatcagcgatcaacagcctcctcaccgtagatgagcatccaggaagtctaggatatggagctagcgcagtcgaaaactatctcgcccgtagtctgggcttcgcattgctcaccctgggtctcgtcaccgtggtgctttccggcagcgtcccggttggagcagtggacacgccggacgatgccctttcaccatatgcagcgcccgtcctcctcctcacgacgttacaccacgcaagctgcgcgttctactcgtgggcgcgttacaactccactggcgagatgggcttcatgcttgggttcatgggaagtgcagggatggctgcttttggaacgtggtgtctgctctttggtggcgagaaggcgagaatcagcaggacgggcaaggataagagaacgagtcagcttttgttcaaggataagaggaggagatgaagggaaaataacgtgcgcgatgaacccgccacttgtgtctttgccgcgagctccagtcgtactctaatctatcacctacgcacagctttcgcagcccgccatttacctccgcatttagatagccacatttgattaaacagtactatgagctaagtagggctccgcatgcgtgtgtaatatggacgctgttaagtacagcagtgcagtaatgtgagctttacccacaagacggtaccgaggcactgaatcattatgaccaagccaatttgcttcgccagtagtcgcgtactcaagaataggcacatatgcaatgccagatccatcgctttagggtctgcatgacttggcaatcggcagtttggattcgcgacaaatttctgtatgcagcgatatacaccaagacaacattaagcacgctacgtcactttatcgcttgatcattgcagttttcacccttctcatgctcatttatagtggctcgaacgcttgccacaaagcgagatgcgacttgcgaggtggcaatgcttcctacatgtaca

SEQ ID NO: 39570 - DNA, 1746 bp, Muscodor strobelii
  misc_feature: SGI cDNA ID NO. 573771
  misc_feature: Reduced expression when VOC is produced
  misc_feature: Encodes the peptide sequence at SEQ ID NO 39571
atgtccgccatcctctccacagacgatctcaacgacttcatctcgcctggtgtcgcgtgcatcaagcccgtcgaaacactgcccgtcgcgcctacgcccgagaaaggaagcgaacctctggaacatgaggtcatcctcgatggccagcagcctgccgctaccaccggcgcgcccgcccagatctccctcaccgactgtctagcatgctcaggttgcgtgacgtctgctgaggctgtcctggtcagtctgcagagccacaacgagctgctcagccttctagatcaagcacctggcctgcgcttggagcgcaatgggtccgatggctcattgagggttgagggcttggacaatcccgatagcaagttgttcgtcgctagtgtatcgcctcaaacacgcgccagtctcgctgccaccgcgggcaagggcataagggagcaggatgccggggcaatgattacgcaactattgtcgggctcggatgggttgaaggccggcgggaagtggaataattctttcacgtgggtagtagacacgaacgcaacacgcgaggcatgcctcctcctgggcgcagaagaagtcttgggggatagtagcatcgctaagccgatactaacatcaagctgccccgggtgggtgtgctatgccgagaagacacatccacatgtgttgccacacatctccaagattaaatccccgcaggctttgatgggtacgctgctcaagacaacactgagccgagtcctgggcattaccgctgatcggatatggcacctcagcgttatgccttgtttcgataaaaagttggaagccagccgtgaagagctgactgactctgtctggaacggatcaggtcagtcggggagaggcatccgcgatgttgactgtgtcatcacgagtaaggaaatcttgatgctgacggaatctaggggcattgatttcttcagtttgcccacagaatcaatacccatttcagcacaaatcccatttgtagacccggtcctgcaggaacttcttttcccttgtggccaaagagggcagcgaaatcccgaggctgggacatcaggcgggaatctgcattacacattgaaatacatcatgtctcggcatgctggatcgcggcttgtcaccgaagccggccggaatgccgacgtcgccaagtatacggtagtatcggcatccggtgaaacgatattcagagcggcgcgatactacgggtttcgaaacattcagaatttggttcggaacctgaaaccagatagaccatcgcgcatgcccagctcaaaagtcactgcggccagcagaagaggtgcgagcaaggcacggagcatggacttagcttatgttgaagtaatggcctgtcctggtgggtgcactaatggcggaggtcaggtcaaagttgatgaccctgtggtcgttcagcgaaaaggacactcatcccaagctggtcctcaggagcagaagtcgtggcttgccgaagtagacgaggcctacttctcagccgacgagagtaaaagcgagaagggtgccagtatgaaagcgggatccgaggatgaagacattcgggactgtacttctccatcatccattcaagatgccctggcacactggagcatggcgacgggcatagatataaagaccctagtttcgaccacataccgggaggtaatcagcgatgtgggcaagagcaagacgagcgagacggatagggtcgtccagctcgccagtaaaatcggtggtggctggtag

SEQ ID NO: 39571 - protein, 581 aa, Muscodor strobelii
  misc_feature: SGI Peptide ID NO. 573771
  misc_feature (110)..(464): Pfam Id: PF02906 Pfam Desc: Iron only hydrogenase large subunit, C-terminal domain
  misc_feature (202)..(317): Pfam Id: PF02906 Pfam Desc: Iron only hydrogenase large subunit, C-terminal domain
  misc_feature (448)..(464): Pfam Id: PF02906 Pfam Desc: Iron only hydrogenase large subunit, C-terminal domain
  misc_feature (1)..(581): NCBI GI: 116181550 Blast Desc: CHGG_01403 [Chaetomium globosum CBS 148.51] gi|121790764|sp|Q2HEF1.1|NAR1_CHAGB RecName: Full=Cytosolic Fe-S cluster assembly factor NAR1; AltName: Full=Nuclear protein 1 CBS
  misc_feature (1)..(581): NCBI GI: 256734549 Blast Desc: [Nectria haematococca mpVI 77-13-4]
  misc_feature (1)..(581): NCBI GI: 85117692 Blast Desc: NCU03204 [Neurospora crassa OR74A] gi|74618782|sp|Q7SGW5.1|NAR1_NEUCR RecName: Full=Cytosolic Fe-S cluster assembly factor nar-1; AltName: Full=Nuclear protein 1
  misc_feature (1)..(581): NCBI GI: 46107184 Blast Desc: FG00475.1 [Gibberella zeae PH-1]
  misc_feature (1)..(581): NCBI GI: 156062172 Blast Desc: SS1G_01201 [Sclerotinia sclerotiorum 1980] gi|259511273|sp|A7E7C4.1|NAR1_SCLS1 RecName: Full=Cytosolic Fe-S cluster assembly factor NAR1; AltName: Full=Nuclear protein 1
  misc_feature (1)..(581): NCBI GI: 259511482 Blast Desc: SS1G_01201 [Sclerotinia sclerotiorum 1980] gi|259511273|sp|A7E7C4.1|NAR1_SCLS1 RecName: Full=Cytosolic Fe-S cluster assembly factor NAR1; AltName: Full=Nuclear protein 1
  misc_feature (1)..(581): NCBI GI: 171687247 Blast Desc: protein product [Podospora anserina] gi|170943585|emb|CAP69237.1| protein product [Podospora anserina]
  misc_feature (1)..(506): NCBI GI: 145616548 Blast Desc: MGG_14526 [Magnaporthe grisea 70-15] gi|145009652|gb|EDJ94308.1| MGG_14526 [Magnaporthe grisea 70-15]
  misc_feature (1)..(581): NCBI GI: 154318177 Blast Desc: BC1G_03256 [Botryotinia fuckeliana B05.10] gi|150842779|gb|EDN17972.1| BC1G_03256 [Botryotinia fuckeliana B05.10]
  misc_feature (1)..(581): NCBI GI: 67526349 Blast Desc: AN3632.2 [Aspergillus nidulans FGSC A4] gi|40740650|gb|EAA59840.1| AN3632.2 [Aspergillus nidulans FGSC A4]
  misc_feature (64)..(467): SWISSPROT Homolog: EC 1.12.7.2 Ferredoxin hydrogenase
  misc_feature: Useful for introducing or modulating the production of volatile compounds
MSAILSTDDLNDFISPGVACIKPVETLPVAPTPEKGSEPLEHEVILDGQQPAATTGAPAQISLTDCLACSGCVTSAEAVLVSLQSHNELLSLLDQAPGLRLERNGSDGSLRVEGLDNPDSKLFVASVSPQTRASLAATAGKGIREQDAGAMITQLLSGSDGLKAGGKWNNSFTWVVDTNATREACLLLGAEEVLGDSSIAKPILTSSCPGWVCYAEKTHPHVLPHISKIKSPQALMGTLLKTTLSRVLGITADRIWHLSVMPCFDKKLEASREELTDSVWNGSGQSGRGIRDVDCVITSKEILMLTESRGIDFFSLPTESIPISAQIPFVDPVLQELLFPCGQRGQRNPEAGTSGGNLHYTLKYIMSRHAGSRLVTEAGRNADVAKYTVVSASGETIFRAARYYGFRNIQNLVRNLKPDRPSRMPSSKVTAASRRGASKARSMDLAYVEVMACPGGCTNGGGQVKVDDPVVVQRKGHSSQAGPQEQKSWLAEVDEAYFSADESKSEKGASMKAGSEDEDIRDCTSPSSIQDALAHWSMATGIDIKTLVSTTYREVISDVGKSKTSETDRVVQLASKIGGGW

SEQ ID NO: 39572 - DNA, 876 bp, Muscodor strobelii
  misc_feature: SGI cDNA ID NO. 573772
  misc_feature: Encodes the peptide sequence at SEQ ID NO 39573
atgtcttctagcggggccgggaaagtccctgacgcctgggacgatgaggattgggaggtccaagccgacaaagcagcagcatctcctgagcctgtcgccgaatcccagaccctgatgtcccgtgccgagcggttaatgcagcacaccgagtcgaataagaagctttggcagtcagccgaagcaccaccagaaccattccactacctggcagcgcgttccgacacgcctctgaccaccgacttcaaacctgctatgaaagtcctcagtcgtaaacctgtgccccaagtcatcaccacgcgagatcctctcaccggtgccgtctcccggcttaaggttcaggatgatgattctgacgaagagcagaagactgttcagctcacccccgaggagatccgtgcgaaacagcagcgcgaacgtgaggagaagcaacgcaagtatgaggaggtgagagccaagatatttgggacccagccagggccctctagatccaccaacaactccaaaccctcctcgggcgcctctacaccaggaaacggcacaccagcaaggatctcggctgattcccgcggctcccgaggccgtggtagaggagggcgtgctggcgtaagtcagcggcagactgacagccgaggaaacagtcggggagacggccgtagtgataatcagccgagttcggccggccaggaactcttcgacccgaactatgcgcccaaaccggggtttcagctggagagaaggggtggaggtcagggtacaccgccgctctcgggcagatctacaccacgtgacgaagatcaggctattcgttcaccaagaggcccatccgacgggaataatcgaggatttgctcgaagaggcaatcgcaaggcagattaa

SEQ ID NO: 39573 - protein, 291 aa, Muscodor strobelii
  misc_feature: SGI Peptide ID NO. 573772
  misc_feature (3)..(274): NCBI GI: 256735262 Blast Desc: NECHADRAFT_74924 [Nectria haematococca mpVI 77-13-4]
  misc_feature (7)..(191): NCBI GI: 116181548 Blast Desc: CHGG_01402 [Chaetomium globosum CBS 148.51] gi|88185699|gb|EAQ93167.1| CHGG_01402 [Chaetomium globosum CBS 148.51]
  misc_feature (9)..(183): NCBI GI: 46107182 Blast Desc: FG00474.1 [Gibberella zeae PH-1]
  misc_feature (9)..(261): NCBI GI: 261356346 Blast Desc: conserved [Verticillium albo-atrum VaMs.102]
  misc_feature (1)..(274): NCBI GI: 119500196 Blast Desc: NFIA_104460 [Neosartorya fischeri NRRL 181] gi|119415020|gb|EAW24958.1| conserved [Neosartorya fischeri NRRL 181]
  misc_feature (1)..(290): NCBI GI: 70993614 Blast Desc: conserved [Aspergillus fumigatus Af293] gi|66849288|gb|EAL89616.1| conserved [Aspergillus fumigatus Af293] gi|159125423|gb|EDP50540.1| conserved [Aspergillus A1163]
  misc_feature (10)..(290): NCBI GI: 145229649 Blast Desc: An01g07090 [Aspergillus niger] gi|134055242|emb|CAK43828.1| [Aspergillus niger]
  misc_feature (10)..(290): NCBI GI: 121708120 Blast Desc: conserved [Aspergillus clavatus NRRL 1] gi|119400183|gb|EAW10609.1| conserved [Aspergillus clavatus NRRL 1]
  misc_feature (8)..(288): NCBI GI: 238843835 Blast Desc: conserved [Microsporum canis CBS 113480]
  misc_feature (1)..(290): NCBI GI: 169771359 Blast Desc: [Aspergillus oryzae RIB40] gi|238486098|ref|XP_002374287.1| conserved [Aspergillus flavus NRRL3357] gi|83768008|dbj|BAE58147.1| protein product oryzae]
MSSSGAGKVPDAWDDEDWEVQADKAAASPEPVAESQTLMSRAERLMQHTESNKKLWQSAEAPPEPFHYLAARSDTPLTTDFKPAMKVLSRKPVPQVITTRDPLTGAVSRLKVQDDDSDEEQKTVQLTPEEIRAKQQREREEKQRKYEEVRAKIFGTQPGPSRSTNNSKPSSGASTPGNGTPARISADSRGSRGRGRGGRAGVSQRQTDSRGNSRGDGRSDNQPSSAGQELFDPNYAPKPGFQLERRGGGQGTPPLSGRSTPRDEDQAIRSPRGPSDGNNRGFARRGNRKAD

SEQ ID NO: 39574 - DNA, 4843 bp, Muscodor strobelii; identical to SEQ ID NO: 39569
  misc_feature: SGI EST ID NO. CUFF.96385.1
  misc_feature: Variant of the nucleotide sequence at SEQ ID NO 39572

SEQ ID NO: 39575 - DNA, 309 bp, Muscodor strobelii
  misc_feature: SGI cDNA ID NO. 573773
  misc_feature: Encodes the peptide sequence at SEQ ID NO 39576
atgcagcacaattcgtcggggggcttgagttcatctcagcaattcccttcccgtgcatctggttccctgcacactccatcgacctccttcagcgatgcacttcacacgccagacgacaagcaggccaaggagtacgaagtcgcaaaaagcaggctgaccgattctaagttcaacataagagattatgctgatccactaggggctgcccgagaggttccccaatcccacttctaccccagaagcgtcactgccgagacagaggaacgattgcttgccattgttgttcaggtcaaggacaagtattcgtaa

SEQ ID NO: 39576 - protein, 102 aa, Muscodor strobelii
  misc_feature: SGI Peptide ID NO. 573773
MQHNSSGGLSSSQQFPSRASGSLHTPSTSFSDALHTPDDKQAKEYEVAKSRLTDSKFNIRDYADPLGAAREVPQSHFYPRSVTAETEERLLAIVVQVKDKYS

SEQ ID NO: 39577 - DNA, 1004 bp, Muscodor strobelii
  misc_feature: SGI EST ID NO. CUFF.95372.0
  misc_feature: Variant of the nucleotide sequence at SEQ ID NO 39575
caagttgctccgtacctgttgtggttgcacaaccacttccatatcaacatcacaatcttagactcttcgcactgcccttgggttgatccattcagtacatacatattttaaactcaggagtcgctcaatatgcagcacaattcgtcggggggcttgagttcatctcagcaattcccttcccgtgcatctggttccctgcacactccatcgacctccttcagcgatgcacttcacacgccagacgacaagcaggccaaggagtacgaagtcgcaaaaagcaggctgaccgattctaagttcaacataagagattatgctgatccactaggggctgcccgagaggttccccaatcccacttctaccccagaagcgtcactgccgagacagaggaacgattgcttgccattgttgttcaggtcaaggacaagtattcgtaagggtcctatctcagtgagaccaaatgaagagccgacatcatgtcgtcagctgcgaacaggccagtgtaaatcggtagattgagcattgctcaatactttgggcagataactgggagagttctggccactacgaatacacagctaaatactcgactttttctgcctcaatggtagacaagaggaccaatatataatgttatccatattgcccatttcgtcctggcccctgtataatcatgccattaggtatgttgcagctgggttgttgagtatcaagacaattctctagtgtgcaactatcttgccttcagatgtttcaactgcgaagctagatcattggctgtataaagaatggcaattaatgttaagatagcaacatttcacactggccctccttgattaagctcccatgccaataagttaatacaagctattggggacccttcctttctacctaaacagcccattggcagataatgatataatgcgcataagatatacacagtcggattacattgatccaacttgatagagccaaaatatgataccctatcctcacatcgtac

SEQ ID NO: 39578 - DNA, 1434 bp, Muscodor strobelii
  misc_feature: SGI cDNA ID NO. 573774
  misc_feature: Reduced expression when VOC is produced
  misc_feature: Encodes the peptide sequence at SEQ ID NO 39579
atggcaaacttgattacaccaaagaaggtgagattcgcagatcgcctcgaatatctgactcctcctcccacagtacgtaaaggtaccattgacgatgaagcggtgcacgataatcccgcgtccttggccgatgctgctctggctgacccaacctcggaaacgagttcgccaatccaatcgcaatgtcagcaagaccaggaggaggcagagatgggcggtgtcgatgatggtgctccgaaggcccagagcgcccatggccacgacgaggacaacggtaggaagccgactgttatccagcactggttgaatggatcgacttcaatcgagcagcgcaaagcccgcttcaactgcttgcttgcatcaatctggccatctgatgcagactttcatgctgccaaacatccgctatatgatgaagataatgatgagggactttgccatgacgattgggttcgctataaggtgtacgacggccatcatcctatggatgaggatgatccggactatgatttggaagatccagccacagatccggccatgagcaccgaagtctggcaaccaaaagttggtgacaatggcatcgacaacgagaaagatcttagcatgatttttgagatgcgcagactgcatgatgccgtggccaaggctcacgccaagcgcaaggatcaaatcatcagggctggaatgaaggctggtgtcaagcttagcaagattgatatgacccgagtctttcttggcccagaaatcgacttttcagaggacgagtgtgaagaagatgaggcggagcaagatgagcagcttgccgccgggccttccatatctacaaagacaatcgctgccggcgatgctacggctgcgatgcgcagcaggctgaagacatcgcaaactcatagcagggttggcaagagaaagactaaacgtcgtaggcgcaggtcggatgacgatgccgcattccgctacgagaccagcaccgacgacgagcagcccaacgggaaacgtatcaagaaaaccatggctgccactccaaacctgaccggagagtggagagctcagacgcgctcaggtgccaccaaggttggtggcctcgacggatcaggggatgtcaacaactctggtggaacagccacggtggaagccaacaatggagcagcctcggacacaacctattacttcagtgaggatcgtctcacccaagaaccgcaaacaaaacacctaggcaatcgcaaacaagagcatccccaaaatgcagaccgggtcgcaacagacatcgcagcagcagtcacagcggccgcagcagcagccatcagcatcggcacatccgtcgatgcacccatctatgccacggtactagcagcagtcgagacagcattcgcagcagtcggcgcagcactcgcaaccctcctcacagacgaagcagcagcacagagcagctag

SEQ ID NO: 39579 - protein, 477 aa, Muscodor strobelii
  misc_feature: SGI Peptide ID NO. 573774
  misc_feature: Useful for introducing or modulating the production of volatile compounds
MANLITPKKVRFADRLEYLTPPPTVRKGTIDDEAVHDNPASLADAALADPTSETSSPIQSQCQQDQEEAEMGGVDDGAPKAQSAHGHDEDNGRKPTVIQHWLNGSTSIEQRKARFNCLLASIWPSDADFHAAKHPLYDEDNDEGLCHDDWVRYKVYDGHHPMDEDDPDYDLEDPATDPAMSTEVWQPKVGDNGIDNEKDLSMIFEMRRLHDAVAKAHAKRKDQIIRAGMKAGVKLSKIDMTRVFLGPEIDFSEDECEEDEAEQDEQLAAGPSISTKTIAAGDATAAMRSRLKTSQTHSRVGKRKTKRRRRRSDDDAAFRYETSTDDEQPNGKRIKKTMAATPNLTGEWRAQTRSGATKVGGLDGSGDVNNSGGTATVEANNGAASDTTYYFSEDRLTQEPQTKHLGNRKQEHPQNADRVATDIAAAVTAAAAAAISIGTSVDAPIYATVLAAVETAFAAVGAALATLLTDEAAAQSS

SEQ ID NO: 39580 - DNA, 234 bp, Muscodor strobelii
  misc_feature: SGI cDNA ID NO. 573775
  misc_feature: Encodes the peptide sequence at SEQ ID NO 39581
atgtctagccaggactactacaaccaaggccctcctcaccagggctacggccacccccagcaaggcggttaccccctcagcagggttacggcggcggtggctaccctcagcagcctcctcaggcctacggcggcggaccgcctcagggacagtactacaacaaccagccacccatgcagtaccatcagcaacccccgcaggaacggagacaaggcggcggcgacggatgcttga

SEQ ID NO: 39581 - protein, 77 aa, Muscodor strobelii
  misc_feature: SGI Peptide ID NO. 573775
MSSQDYYNQGPPHQGYGHPQQGGYPLSRVTAAVATLSSLLRPTAADRLRDSTTTTSHPCSTISNPRRNGDKAAATDA

SEQ ID NO: 39582 - DNA, 2385 bp, Muscodor strobelii
  misc_feature: SGI cDNA ID NO. 573776
  misc_feature: Reduced expression when VOC is produced
  misc_feature: Encodes the peptide sequence at SEQ ID NO 39583
atggcctcgttgaatctgtccatcaatgggccctccatcaagagcagctaccagggcgtcgtcaatgcccccgcgcccccctccggtagctcctcgacctatgcccactgggtcctgctgtctgtgcaagctcccctggccagtgcttttcaggacagcggcagcaaggagagtgtgctcaaggtgcagaccaccggcgacggcgagctcgacgagctggtcgaggatttcagcgagggccgaatccagttcgcctttgtcaagatcaaagatccaaacacgggccttcccaagtacgctctgatcgcctggtgcggcgatggtgttcccgagcggactaagggctacttcacaagtcatttgaacgctgtatccaaggttctacatggctatcacgtacagatcacagcgcggtccgcagccgacctggagccgtccaacatcttgcaaaaggtctccgatgcttccggcgccaaatataccgctggaggcagtgcccctatgaaggccagggggccaccacccgctgtcaagtccaaacctgtctttgccgcctcgtcgggctcgagcatctccttcaacccgctcatcgcggcgcgcaatgccaatctaagaagcaagacaaacgacgatggctggggcgatgacgcgcccccagtctcccggtccgagatccagaaagtccagtctgcatataagcccaccaaggtgaacatggatgaattgcggaaccagaaacaagcgacttctcgtttcaatggcccatccaccaccgaggacaggagcgatgtcattgggggaggatacaaacctgtcggcaaagtcgatattgcggccattcgagctgctgctaaggagaagaaggacgacaggcccacgcctgtcaaaggcgcctacgaacctgttggcaaagtggacattgccgccatccgagcgagatcccaacagcccagcgaacctgcaaacgacgaagccgggtaccagcccaagtcgctgtctgagcggagtgctgccttcagccagtctgaacgcatccgagagatgcctaagcccaaggtggccaagaaattcggaggtgcatctgctttcatggggaccaaggcacctacgccgggatccctaggttttggcgggccatctcctgcttctgccgcccccgtcggagcggcgagccgaacctttgcggatcagggaggaaagacaccagcccagatctgggcagagaagaaggccgcgcagggtggcgcacccgccaaagtcccgactccctccgctacttctccggtcaccccccaaaagagcggaggcgcagggtggcagagcggctatgcaggtaaatcctggaagcctgttcagacaggagcatacgggcgtggaattaccggtgaaaagacagaggacacggccagccaggaagctcctgctcacgaggcatcaagagacgttggttctattagggatcaattcaatgaggcccctcctcctgtccctagtacggctcggccccgagatattcctgatgagcggtcaccttcacctcctccagtggccagccgaggtttggacagtgcaccctctggaggatttgcactgcctggcatgccaccgcgtcccccacctgtaactgacgagccggaggaggagcctgagcctgagcctgagcccgagagatcgccctctcctgtgcgcgttgcagtgccggtacctcgagtccctgaacccgagatcgagcctgtcaaggagccgccccgctcactcccagttcatgctatcgagcagcagctgccgcagccagatgagatccccgaggaacatgaagctcatgatccgcgcgctgcagccactgctattgctgaagaccaatttgaccaggaacagacgtcgaaggccactgcaggcacgagtggagggcagcgagctgtcgtcatgtacgactacgagaaggcggaggataacgagctcgaattgcacgagggcgaatatgtgactaacattgaccaagtggatgaagactggtggatgggaaccaacgcgcagggcgaaatcggcctgttccccagcaattacgtggaacttgtggaagacgagcccgcacaagaagaatcagcacctactccggtgccagtgcccgccccggcgcccatagcggccgagtctgcacggcgtacagaacccgagcccgagcccgagccagtgtccgccgctgacgagggacacaccgcaacggctcagttcgactacgaggctgcggaggacaatgaactgagctttcccgaaggtgccaaggtcacgcatctcgagttccccgatgaggattggtggtatggttcgtacaacggtgagttcggtttattccccgccaactacgtgcagcttgatcagtag

SEQ ID NO: 39583 - protein, 794 aa, Muscodor strobelii
  misc_feature: SGI Peptide ID NO. 573776
  misc_feature (44)..(153): Pfam Id: PF00241 Pfam Desc: Cofilin/tropomyosin-type actin-binding protein
  misc_feature (638)..(693): Pfam Id: PF00018 Pfam Desc: SH3 domain
  misc_feature (739)..(793): Pfam Id: PF00018 Pfam Desc: SH3 domain
  misc_feature (639)..(693): Pfam Id: PF07653 Pfam Desc: Variant SH3 domain
  misc_feature (740)..(793): Pfam Id: PF07653 Pfam Desc: Variant SH3 domain
  misc_feature (61)..(153): Pfam Id: PF00241 Pfam Desc: Cofilin/tropomyosin-type actin-binding protein
  misc_feature (1)..(793): NCBI GI: 85088820 Blast Desc: NCU10073 [Neurospora crassa OR74A] gi|28919121|gb|EAA28633.1| conserved [Neurospora crassa OR74A]
  misc_feature (1)..(794): NCBI GI: 39976911 Blast Desc: MGG_06358 [Magnaporthe grisea 70-15] gi|145016238|gb|EDK00728.1| MGG_06358 [Magnaporthe grisea 70-15]
  misc_feature (1)..(793): NCBI GI: 116180220 Blast Desc: CHGG_00738 [Chaetomium globosum CBS 148.51] gi|88185035|gb|EAQ92503.1| CHGG_00738 [Chaetomium globosum CBS 148.51]
  misc_feature (1)..(794): NCBI GI: 46108868 Blast Desc: FG01316.1 [Gibberella zeae PH-1]
  misc_feature (1)..(794): NCBI GI: 169602211 Blast Desc: SNOG_04101 [Phaeosphaeria nodorum SN15] gi|111066741|gb|EAT87861.1| SNOG_04101 [Phaeosphaeria nodorum SN15]
  misc_feature (1)..(794): NCBI GI: 171688007 Blast Desc: protein product [Podospora anserina] gi|170943965|emb|CAP69617.1| protein product [Podospora anserina]
  misc_feature (1)..(794): NCBI GI: 240110527 Blast Desc: Variant SH3 domain containing protein [Coccidioides posadasii C735 delta SOWgp]
  misc_feature (1)..(793): NCBI GI: 225560139 Blast Desc: conserved [Ajellomyces capsulatus G186AR]
  misc_feature (1)..(794): NCBI GI: 156050113 Blast Desc: SS1G_07643 [Sclerotinia sclerotiorum 1980] gi|154692044|gb|EDN91782.1| SS1G_07643 [Sclerotinia sclerotiorum 1980]
  misc_feature (1)..(793): NCBI GI: 240278886 Blast Desc: actin binding protein [Ajellomyces capsulatus H143]
  misc_feature: Useful for introducing or modulating the production of volatile compounds
MASLNLSINGPSIKSSYQGVVNAPAPPSGSSSTYAHWVLLSVQAPLASAFQDSGSKESVLKVQTTGDGELDELVEDFSEGRIQFAFVKIKDPNTGLPKYALIAWCGDGVPERTKGYFTSHLNAVSKVLHGYHVQITARSAADLEPSNILQKVSDASGAKYTAGGSAPMKARGPPPAVKSKPVFAASSGSSISFNPLIAARNANLRSKTNDDGWGDDAPPVSRSEIQKVQSAYKPTKVNMDELRNQKQATSRFNGPSTTEDRSDVIGGGYKPVGKVDIAAIRAAAKEKKDDRPTPVKGAYEPVGKVDIAAIRARSQQPSEPANDEAGYQPKSLSERSAAFSQSERIREMPKPKVAKKFGGASAFMGTKAPTPGSLGFGGPSPASAAPVGAASRTFADQGGKTPAQIWAEKKAAQGGAPAKVPTPSATSPVTPQKSGGAGWQSGYAGKSWKPVQTGAYGRGITGEKTEDTASQEAPAHEASRDVGSIRDQFNEAPPPVPSTARPRDIPDERSPSPPPVASRGLDSAPSGGFALPGMPPRPPPVTDEPEEEPEPEPEPERSPSPVRVAVPVPRVPEPEIEPVKEPPRSLPVHAIEQQLPQPDEIPEEHEAHDPRAAATAIAEDQFDQEQTSKATAGTSGGQRAVVMYDYEKAEDNELELHEGEYVTNIDQVDEDWWMGTNAQGEIGLFPSNYVELVEDEPAQEESAPTPVPVPAPAPIAAESARRTEPEPEPEPVSAADEGHTATAQFDYEAAEDNELSFPEGAKVTHLEFPDEDWWYGSYNGEFGLFPANYVQLDQ

SEQ ID NO: 39584 - DNA, 3263 bp, Muscodor strobelii
  misc_feature: SGI EST ID NO. CUFF.95895.1
  misc_feature: Variant of the nucleotide sequence at SEQ ID NO 39582
aggcagccattttctgcacgactgtttatatagcaagcaaagacgcgaagaccaaagggaagatcggattgagacacaaaagaacggtacacaggaatagggagaaggatctcctcgccgtccgtcgtccaatcctacaatcaaaccagtcgtcgtcgacggattacccagtagacctgtagtagttaagtagtatctacgtacctattataggtcggcagcaggcaggaggacctctattccacgtgcgactttacaaggctctgacatcacccccacccacgaactggaagcgttgctctctcccaatcgcccactcctccaatccctatctacataccttaattatttcaacccccctgtcgccgccgtctcccgcctgcctctgttctgtgttctgcctcacgcagcaagagtcgctcacacatcgacaccgctgcgcagccatggcctcgttgaatctgtccatcaatgggccctccatcaagagcagctaccagggcgtcgtcaatgcccccgcgcccccctccggtagctcctcgacctatgcccactgggtcctgctgtctgtgcaagctcccctggccagtgcttttcaggacagcggcagcaaggagagtgtgctcaaggtgcagaccaccggcgacggcgagctcgacgagctggtcgaggatttcagcgagggccgaatccagttcgcctttgtcaagatcaaagatccaaacacgggccttcccaagtacgctctgatcgcctggtgcggcgatggtgttcccgagcggactaagggctacttcacaagtcatttgaacgctgtatccaaggttctacatgtgcgctgacccctccttgctgctatcttccctggattcccaaagctgaagtgtcgcagggctatcacgtacagatcacagcgcggtccgcagccgacctggagccgtccaacatcttgcaaaaggtctccgatgcttccggcgccaaatataccgctggaggcagtgcccctatgaaggccagggggccaccacccgctgtcaagtccaaacctgtctttgccgcctcgtcgggctcgagcatctccttcaacccgctcatcgcggcgcgcaatgccaatctaagaagcaagacaaacgacgatggctggggcgatgacgcgcccccagtctcccggtccgagatccagaaagtccagtctgcatataagcccaccaaggtgaacatggatgaattgcggaaccagaaacaagcgacttctcgtttcaatggcccatccaccaccgaggacaggagcgatgtcattgggggaggatacaaacctgtcggcaaagtcgatattgcggccattcgagctgctgctaaggagaagaaggacgacaggcccacgcctgtcaaaggcgcctacgaacctgttggcaaagtggacattgccgccatccgagcgagatcccaacagcccagcgaacctgcaaacgacgaagccgggtaccagcccaagtcgctgtctgagcggagtgctgccttcagccagtctgaacgcatccgagagatgcctaagcccaaggtggccaagaaattcggaggtgcatctgctttcatggggaccaaggcacctacgccgggatccctaggttttggcgggccatctcctgcttctgccgcccccgtcggagcggcgagccgaacctttgcggatcagggaggaaagacaccagcccagatctgggcagagaagaaggccgcgcagggtggcgcacccgccaaagtcccgactccctccgctacttctccggtcaccccccaaaagagcggaggcgcagggtggcagagcggctatgcaggtaaatcctggaagcctgttcagacaggagcatacgggcgtggaattaccggtgaaaagacagaggacacggccagccaggaagctcctgctcacgaggcatcaagagacgttggttctattagggatcaattcaatgaggcccctcctcctgtccctagtacggctcggccccgagatattcctgatgagcggtcaccttcacctcctccagtggccagccgaggtttggacagtgcaccctctggaggatttgcactgcctggcatgccaccgcgtcccccacctgtaactgacgagccggaggaggagcctgagcctgagcctgagcccgagagatcgccctctcctgtgcgcgttgcagtgccggtacctcgagtccctgaacccgagatcgagcctgtcaaggagccgccccgctcactcccagttcatgctatcgagcagcagctgccgcagccagatgagatccccgaggaacatgaagctcatgatccgcgcgctgcagccactgctattgctgaagaccaatttgaccaggaacagacgtcgaaggccactgcaggcacgagtggagggcagcgagctgtcgtcatgtacgactacgagaaggcggaggataacgagctcgaattgcacgagggcgaatatgtgactaacattgaccaagtggatgaagactggtggatgggaaccaacgcgcagggcgaaatcggcctgttccccagcaattacgtggaacttgtggaagacgagcccgcacaagaagaatcagcacctactccggtgccagtgcccgccccggcgcccatagcggccgagtctgcacggcgtacagaacccgagcccgagcccgagccagtgtccgccgctgacgagggacacaccgcaacggctcagttcgactacgaggctgcggaggacaatgaactgagctttcccgaaggtgccaaggtcacgcatctcgagttccccgatgaggattggtggtatggttcgtacaacggtgagttcggtttattccccgccaactacgtgcagcttgatcagtaggtgtatgtacatgtacctattgtcaaggacgtagtgggtggtggcttgggagcttcattgcacgatgaaggaagctatcgagttggaaggcacagatagagagaggtgctgtcaattgcgatatccagacctgggcaaataacaggcacgcctgagctatagttatcgttgcgatcctatggggggattcaaaattgaagtcttctgaagataagctaccgaatatcgacatgtgtattagtgccatggcatgagaacacagtcatgttaattacacaatagatcattctcatacatctgctctcacgtaactcctcgtaagctcaccccctagatgatcaatacgtcaagtataccttagattggtgattcc

SEQ ID NO: 39585 - DNA, 1125 bp, Muscodor strobelii
  misc_feature: SGI cDNA ID NO. 573777
  misc_feature: Encodes the peptide sequence at SEQ ID NO 39586
atgggtctgctgtcggattcatcctcggcgataagctcgctgtcgtcagacgagtccgaccaggagaacgagttcgatgacgccggcgtcgtcgacgagcccgccttgcccccctccaaacgccagaagctgcgagacggctcgcgcgcctcgtcgtccgtccacatagaccccgagccagaagccgagcccgagcaggagcccgagcaagagcccgaccttgacgacggcgacatttcctcagacacctcgggcgacgtccccaactcccccatcaatgccaagcttgacgaggacgagttccaggagcaggtcaccgtctgtgcctgggacggctgcggcgccggcgatctgggcaacatggaccgactggtcgagcacatccacaacgaccacatcgagagtcgccagaagaagtacacctgcgagtggaacggctgctcccggaagagcatgccccacgccagcggctatgccctcaaggcgcacatgcgaagccatacccgcgagaagcccttctactgctatctaccagagtgcgaccgcgccttcacgaggtccgacgctctcgccaagcacatgaggacggtccacgagaccgaggccctgcgaccttcggaccccgtgcccaaatcgatgcagctccacggcgacaagaagaataacaagctcaagatcatcatcaagacgccacagtcccactcggccggccaagacgactcggtcgacgacggcgacagcagcgacgtgatcggagcggacttcttcacgcctctcaccgagcagcagggcttctctggccaggagttggccatggacatggaatcgctatggcggctgtgtgtggcgcacgtcaagtgggccaccaaagagggcgacatgctgcggcgcgagtgtgaggaggcggaggagatataccgccaagagtggctggagaaggacacgctcgtgaaccaagcgcagcgcatcgagcaagactggtggcagcgccgcaaagccgtgctcgccgccgaagccagtatcaagccacgggaacgcgaggccgtggagcgtgacggccacgatgcgacggagctcatgatggaggatgaagacgacgacacccggtccagtgtccctatctag

SEQ ID NO: 39586 - protein, 374 aa, Muscodor strobelii
  misc_feature: SGI Peptide ID NO. 573777
  misc_feature (173)..(198): Pfam Id: PF00096 Pfam Desc: Zinc finger, C2H2 type
  misc_feature (9)..(363): NCBI GI: 85117701 Blast Desc: NCU03206 [Neurospora crassa OR74A] gi|28927113|gb|EAA36070.1| conserved [Neurospora crassa OR74A]
  misc_feature (3)..(350): NCBI GI: 256734548 Blast Desc: [Nectria haematococca mpVI 77-13-4]
  misc_feature (15)..(342): NCBI GI: 261356341 Blast Desc: zinc finger protein [Verticillium albo-atrum VaMs.102]
  misc_feature (22)..(368): NCBI GI: 46107188 Blast Desc: FG00477.1 [Gibberella zeae PH-1]
  misc_feature (6)..(356): NCBI GI: 171687243 Blast Desc: protein product [Podospora anserina] gi|170943583|emb|CAP69235.1| protein product [Podospora anserina]
  misc_feature (37)..(336): NCBI GI: 116181554 Blast Desc: CHGG_01405 [Chaetomium globosum CBS 148.51] gi|88185702|gb|EAQ93170.1| CHGG_01405 [Chaetomium globosum CBS 148.51]
  misc_feature (12)..(344): NCBI GI: 39950797 Blast Desc: MGG_11252 [Magnaporthe grisea 70-15] gi|145616391|ref|XP_001403081.1| MGG_01249 [Magnaporthe grisea 70-15] gi|145010185|gb|EDJ94841.1| MGG_01249 [Magnaporthe grisea
  misc_feature (5)..(359): NCBI GI: 156062166 Blast Desc: SS1G_01198 [Sclerotinia sclerotiorum 1980] gi|154696535|gb|EDN96273.1| SS1G_01198 [Sclerotinia sclerotiorum 1980]
  misc_feature (5)..(345): NCBI GI: 154318169 Blast Desc: BC1G_03252 [Botryotinia fuckeliana B05.10] gi|150842775|gb|EDN17968.1| BC1G_03252 [Botryotinia fuckeliana B05.10]
  misc_feature (9)..(349): NCBI GI: 225682811 Blast Desc: conserved [Paracoccidioides brasiliensis Pb03] gi|226290255|gb|EEH45739.1| zinc finger protein [Paracoccidioides brasiliensis Pb18]
MGLLSDSSSAISSLSSDESDQENEFDDAGVVDEPALPPSKRQKLRDGSRASSSVHIDPEPEAEPEQEPEQEPDLDDGDISSDTSGDVPNSPINAKLDEDEFQEQVTVCAWDGCGAGDLGNMDRLVEHIHNDHIESRQKKYTCEWNGCSRKSMPHASGYALKAHMRSHTREKPFYCYLPECDRAFTRSDALAKHMRTVHETEALRPSDPVPKSMQLHGDKKNNKLKIIIKTPQSHSAGQDDSVDDGDSSDVIGADFFTPLTEQQGFSGQELAMDMESLWRLCVAHVKWATKEGDMLRRECEEAEEIYRQEWLEKDTLVNQAQRIEQDWWQRRKAVLAAEASIKPREREAVERDGHDATELMMEDEDDDTRSSVPI

SEQ ID NO: 39587 - DNA, 5827 bp, Muscodor strobelii
  misc_feature: SGI EST ID NO. CUFF.96425.0
  misc_feature: Variant of the nucleotide sequence at SEQ ID NO 39585
gtaggccgtcgttgtgcaagagcaacaaggccagggagcttcgaaataagacagggcaaaccattccgatcatcacccgcgtcgcctcttgcaccctcaattttcgtagaccgccgtgtgtccatcccgccttgacttatgagctgtgagtgcgtgcgcatagtgttcgagccctcgttgtgtcacgtcgaccacgccgctgtcctcgctgtcctcgggctgtgcgcgccctgaccgcgaccaccaccaccactcctctacatctgcagctatttgacacgatacggaaccaccacatctttcacctcagccatgggtctgctgtcggattcatcctcggcgataagctcgctgtcgtcagacgagtccgaccaggagaacgagttcgatgacgccggcgtcgtcgacgagcccgccttgcccccctccaaacgccagaagctgcgagacggctcgcgcgcctcgtcgtccgtccacatagaccccgagccagaagccgagcccgagcaggagcccgagcaagagcccgaccttgacgacggcgacatttcctcagacacctcgggcgacgtccccaactcccccatcaatgccaagcttgacgaggacgagttccaggagcaggtcaccgtctgtgcctgggacggctgcggcgccggcgatctgggcaacatggaccgactggtcgagcacatccacaacgaccacatcgagagtcgccagaagaagtacacctgcgagtggaacggctgctcccggaagagcatgccccacgccagcggctatgccctcaaggcgcacatgcgaagccatacccgcgagaagcccttctactgctatctaccagagtgcgaccgcgccttcacgaggtccgacgctctcgccaagcacatgaggacggtccacgagaccgaggccctgcgaccttcggaccccgtgcccaaatcgatgcagctccacggcgacaagaagaataacaagctcaagatcatcatcaagacgccacagtcccactcggccggccaagacgactcggtcgacgacggcgacagcagcgacgtgatcggagcggacttcttcacgcctctcaccgagcagcagggcttctctggccaggagttggccatggacatggaatcgctatggcggctgtgtgtggcgcacgtcaagtgggccaccaaagagggcgacatgctgcggcgcgagtgtgaggaggcggaggagatataccgccaagagtggctggagaaggacacgctcgtgaaccaagcgcagcgcatcgagcaagactggtggcagcgccgcaaagccgtgctcgccgccgaagccagtatcaagccacgggaacgcgaggccgtggagcgtgacggccacgatgcgacggagctcatgatggaggatgaagacgacgacacccggtccagtgtccctatctagagcgcttgaactgcacagcgggagagtgaggcgtccttctggctagagcagcagattggagagggagccaaggctcaaccatgccgatttctgcgtctccatccctttctccggctttgacctggccgaggggaagaaaatgcctggactatagtcaacgaggatgcgaagcagtatttctattatacctcaggagatgattggcttggtactcgatggcggtcgaagaggtatattactacatgtgacgccattaccatcaaccccgaacactttcaggccagcatattgctggcgtagtcacatgatgtctggcgagctcaccatatatgagttgattactcctacggctctcgactctcgacttaccaacaacgacagggcaatggccgaatccgaacaatccgaactacggggtgaggtacaaggagaaaggcacgcttaggtcatgtaggcccgagaaatgtccctagcagcagtggtcgtagttttcaagcaagaaaaggaaaggttgtctctatcacgatggccgtctgtcgagcagtagacagaatagacccaccatgacgcccttcctggcatgagtcggcgacgtgtgataggacgacgaaccgacaatacagtcgttcgatattaactgtagcgacgtaaactacccgatcggagaagtacgaacacaatgtttggttcgaacgtttacattacacttgaagtaggctgtgtctggacgcgcgagatgtgcttattcagtacgcgagggtatattctatatgtcgtaactacctaggtacctcacgccgcttaccgatataatgcagcgccatcatctctggcattccgtgcaacttgatcgatacaaagtgcgaattatggttgactctagcttggttgcccacaggcactcatcgttgtcgttggaaggatgagactgtgcgtagactgtaggtagcgggcggtgaagatggaatgatgttgactcgggacattgtcagatgaattcagaggtgtctaattagcgggagcggcgggaacagggggtcatcaaatgccccgcgattggcttgttggaggaggggccacggttttagcgggcattacgttaagagagcccctcgctggcgcaatcgcaggtaagccgagttcgcaaaccgtcgaaatttaaaagcaatagtactcagtacctacatgtacgtgtagtgacgcccatgtggttatcaatactagaccaggcaccaccggacagacgccatcccaccggctagcagagacaacagcaaagcttttgtttattaccatctcccaacaccgacaacagaaagacgccggtgtctacttcgcatctgttagactcggggccttggccattgctcttctgtctcacggccctccgtccacagcccacagcatgtcgacactcaaggacatcacaaccgaggacgagtggcgttcgcacgtcggcgccctccccaagtcgacgctcctggtcatatccttccacgcgccgtgggccgcgccgtgtgcgcagatgacgaccgtcctgcgcaccctcgctagcgagtacccggacgacggcaagacgagctgggtctccatcaacgccgaggacctcagcgacatctccgagacctacgacgtcaccgccgtcccctacctcgtcctgcagcgcaacgaccaggtcctcgacaccgtcagcggcagcagcgccgtcaaggtccgcaccgccatcgagaagcacgccaagcacgccgccgccgccgcgcccaacacaaacggcacctctgccaacgacgccaacgacgccaccgccccgatggccctcgacgatcccgacgtcgatcccgccaaggccaaggacgagctgttcaagcgcctcggcgagcttgtcaaggcagcgcccgtcatgctcttcatgaagggcacccccagcgccccgcagtgtggcttctcgcgccagctcgtcgccatcctgcgcgagcggagcgtcaagtacggcttcttcaacatcctggccgacgacgaggtccgacagggtctgaaggagtttgccgaatggcccacctacccacagctctggatggatggcgagctggtcggtggtctagatatcattaaggaggagctggacaacaacgaggccttcttcgcgtcccacagcgctgccaaagaagagggtgtagccgcggcctgaaacactgcacaggcaaaatacaacatcaataatcatatgtcccacgtccaacctgcaaattggccggccatgtctctgacaaagtcgagaagcggggcgagctgttgaagacgtctcatatctctttcgctgaacgaatactgcctcctacctgtctcttggagttcatttggatctagtgccgtatctcaatggacaggcgagatctcggcaatgtgagttgggtggcgaggggttgaacatcagtgagtgtgtcagctttgtcgtaatctggtaacaggcgaggtgggtcatggacaaaactctacctaggcgtgcccctgacgcatcggttcgcactttggtctggaaaaaaaaaaatccaagatataccccaattcaagttacttcgatggagcgaagaccgagatcttcatatgctttgatctttgcctctggggtggaaagctgtaatgttgaaaacgatagacgattcttttcaatcaacatctacttcgggttgaaccagtctacgtcaaaacctcagaaagtgtgattccccatgctgcgacacacgtgcaacgaaggtgtaagatcgaatattaaaagtttccagtttccagtagctaccacatccgaaaaagtgcggcgcagctctactctctatgtagcagatgagagcttgtgtcctcagaggtatatgaatccaaatatcaataaatcatcccctccaccatattgcgccgattgccaaaccaactcccgtgtcgtctcatgcaaaaaataattcccgtcgcttcatcacccatcatcgtcgaaggatcatttttcagggccttgtgtagataactcaatgtgttcctagtttcctttcttttcgtttgctagcacccgcattctaaggaatggaggagcgaactgagcgttcatcaggtttcctatcgtcagattgacgacgtgagcaacctgtcacatcccatatcttcgagtctagatggcgatacgaagtggggtgcttagctcacgactcgtgctaacagccgacatgtgagtagagtcttcacccatcacaggtttggactctgccctagaaagagcccattctctcctcaaggccgccccaatagacgatgggcctcggctcgagcaggttgagctcgacacctgatcgctgcttctctgcttccatgtccaaaatagacggctgccggaagaggacggcgttgatagtgtggacaggcgaagatgagcctgattcagaacttgtcgtttgcgaggaggccgatgatgaccggcgcatcgatgtccgcagattgctcggcgaaaagcgagagcggatggtctggaagcgtgacatgtgctgcatattgtatatagtgaatttgtgtgttgaagcggatttgtcttggaaatgctacgaagagtgcttgtctgtgtctgatcggaatgacgtagcaagataatgatacaaaaatggcccagcccagcggttgaaaacggtactcggtgtgaaggtagcgagtgtttgacggattacggggataaagataggacgatccagtctcgcaggatcccaacggtggtgtaagaaggaaaatatgctaaagtaagagattgcggacttgaaaagaaaggaaagaagtcacacgaaccaagtacgaagatagctggcgaggtggtgtagcatggactcttatgggtgtctgcgaactgggccgcatgatctcttcaaacggcgaagggtcgtgtctaggcatggaaatagaatcgcggcatgggtccatcattgtgatacaagcaggggtatggagcgaggagagatcgaccatgctcattcaggggtggggaatcgcatcgcatacctcatctcgctcatctacccatcctcgagactcatgttcatgcatgaagcgattcatgcttccggtgacgaggaatagcttgatgcgcctcgtcacgcctgtgttatcctcacgcggcgcagagacacccaaggcttgagcgagagcatgatggagaagactttacctgaagaatacatacacgcatacataccttacatagaatgaatggcccttcaaatcctgaaacgttgacgtcccctgcttcatctgatctggcgatgatgatacccgtttggtagcaggcgactgtttggacagtaagaacgaccgggcaattagcactgtattctataccagccatgacttatgttcctccgag

SEQ ID NO: 39588 - DNA, 783 bp, Muscodor strobelii
  misc_feature: SGI cDNA ID NO. 573778
  misc_feature: Encodes the peptide sequence at SEQ ID NO 39589
atgtcgacactcaaggacatcacaaccgaggacgagtggcgttcgcacgtcggcgccctccccaagtcgacgctcctggtcatatccttccacgcgccgtgggccgcgccgtgtgcgcagatgacgaccgtcctgcgcaccctcgctagcgagtacccggacgacggcaagacgagctgggtctccatcaacgccgaggacctcagcgacatctccgagacctacgacgtcaccgccgtcccctacctcgtcctgcagcgcaacgaccaggtcctcgacaccgtcagcggcagcagcgccgtcaaggtccgcaccgccatcgagaagcacgccaagcacgccgccgccgccgcgcccaacacaaacggcacctctgccaacgacgccaacgacgccaccgccccgatggccctcgacgatcccgacgtcgatcccgccaaggccaaggacgagctgttcaagcgcctcggcgagcttgtcaaggcagcgcccgtcatgctcttcatgaagggcacccccagcgccccgcagtgtggcttctcgcgccagctcgtcgccatcctgcgcgagcggagcgtcaagtacggcttcttcaacatcctggccgacgacgaggtccgacagggtctgaaggagtttgccgaatggcccacctacccacagctctggatggatggcgagctggtcggtggtctagatatcattaaggaggagctggacaacaacgaggccttcttcgcgtcccacagcgctgccaaagaagagggtgtagccgcggcctga

SEQ ID NO: 39589 - protein, 260 aa, Muscodor strobelii
  misc_feature: SGI Peptide ID NO. 573778
  misc_feature (165)..(229): Pfam Id: PF00462 Pfam Desc: Glutaredoxin
  misc_feature (6)..(110): Pfam Id: PF00085 Pfam Desc: Thioredoxin
  misc_feature (1)..(260): NCBI GI: 85111703 Blast Desc: NCU09803 [Neurospora crassa OR74A] gi|28925826|gb|EAA34827.1| NCU09803 [Neurospora crassa OR74A]
  misc_feature (1)..(252): NCBI GI: 46108870 Blast Desc: FG01317.1 [Gibberella zeae PH-1]
  misc_feature (1)..(260): NCBI GI: 171688003 Blast Desc: protein product [Podospora anserina] gi|170943963|emb|CAP69615.1| protein product [Podospora anserina]
  misc_feature (1)..(250): NCBI GI: 116180224 Blast Desc: CHGG_00740 [Chaetomium globosum CBS 148.51] gi|88185037|gb|EAQ92505.1| CHGG_00740 [Chaetomium globosum CBS 148.51]
  misc_feature (1)..(250): NCBI GI: 145608814 Blast Desc: MGG_06356 [Magnaporthe grisea 70-15] gi|145016242|gb|EDK00732.1| MGG_06356 [Magnaporthe grisea 70-15]
  misc_feature (1)..(259): NCBI GI: 256735026 Blast Desc: [Nectria haematococca mpVI 77-13-4]
  misc_feature (1)..(253): NCBI GI: 156050109 Blast Desc: SS1G_07640 [Sclerotinia sclerotiorum 1980] gi|154692042|gb|EDN91780.1| SS1G_07640 [Sclerotinia sclerotiorum 1980]
  misc_feature (1)..(253): NCBI GI: 154317962 Blast Desc: BC1G_02964 [Botryotinia fuckeliana B05.10] gi|150843622|gb|EDN18815.1| BC1G_02964 [Botryotinia fuckeliana B05.10]
  misc_feature (1)..(253): NCBI GI: 238488925 Blast Desc: thioredoxin, [Aspergillus flavus NRRL3357] gi|220698088|gb|EED54428.1| thioredoxin, [Aspergillus flavus NRRL3357]
  misc_feature (1)..(253): NCBI GI: 115401752 Blast Desc: monothiol glutaredoxin-4 [Aspergillus terreus NIH2624] gi|114190405|gb|EAU32105.1| monothiol glutaredoxin-4 [Aspergillus terreus NIH2624]
MSTLKDITTEDEWRSHVGALPKSTLLVISFHAPWAAPCAQMTTVLRTLASEYPDDGKTSWVSINAEDLSDISETYDVTAVPYLVLQRNDQVLDTVSGSSAVKVRTAIEKHAKHAAAAAPNTNGTSANDANDATAPMALDDPDVDPAKAKDELFKRLGELVKAAPVMLFMKGTPSAPQCGFSRQLVAILRERSVKYGFFNILADDEVRQGLKEFAEWPTYPQLWMDGELVGGLDIIKEELDNNEAFFASHSAAKEEGVAAA

SEQ ID NO: 39590 - DNA, 5827 bp, Muscodor strobelii; identical to SEQ ID NO: 39587
  misc_feature: SGI EST ID NO. CUFF.96425.0
  misc_feature: Variant of the nucleotide sequence at SEQ ID NO 39588

SEQ ID NO: 39591 - DNA, 279 bp, Muscodor strobelii
  misc_feature: SGI cDNA ID NO. 573779
  misc_feature: Encodes the peptide sequence at SEQ ID NO 39592
atgcagcacatgtcacgcttccagaccatccgctctcgcttttcgccgagcaatctgcggacatcgatgcgccggtcatcatcggcctcctcgcaaacgacaagttctgaatcaggctcatcttcgcctgtccacactatcaacgccgtcctcttccggcagccgtctattttggacatggaagcagagaagcagcgatcaggtgtcgagctcaacctgctcgagccgaggcccatcgtctattggggcggccttgaggagagaatgggctctttctag

SEQ ID NO: 39592 - protein, 92 aa, Muscodor strobelii
  misc_feature: SGI Peptide ID NO. 573779
  misc_feature (40)..(92): NCBI GI: 154297404 Blast Desc: BC1G_12106 [Botryotinia fuckeliana B05.10] gi|150858611|gb|EDN33803.1| BC1G_12106 [Botryotinia fuckeliana B05.10]
  misc_feature (43)..(92): NCBI GI: 156062112 Blast Desc: [Sclerotinia sclerotiorum 1980] gi|154696508|gb|EDN96246.1| [Sclerotinia sclerotiorum 1980]
  misc_feature (6)..(89): NCBI GI: 116206910 Blast Desc: [Chaetomium globosum CBS 148.51] gi|88183345|gb|EAQ90813.1| [Chaetomium globosum CBS 148.51]
MQHMSRFQTIRSRFSPSNLRTSMRRSSSASSQTTSSESGSSSPVHTINAVLFRQPSILDMEAEKQRSGVELNLLEPRPIVYWGGLEERMGSF

SEQ ID NO: 39593 - DNA, 6008 bp, Muscodor strobelii
  misc_feature: SGI EST ID NO. CUFF.96425.1
  misc_feature: Variant of the nucleotide sequence at SEQ ID NO 39591
ctcggaggaacataagtcatggctggtatagaatacagtgctaattgcccggtcgttcttactgtccaaacagtcgcctgctaccaaacgggtatcatcatcgccagatcagatgaagcaggggacgtcaacgtttcaggatttgaagggccattcattctatgtaaggtatgtatgcgtgtatgtattcttcaggtaaagtcttctccatcatgctctcgctcaagccttgggtgtctctgcgccgcgtgaggataacacaggcgtgacgaggcgcatcaagctattcctcgtcaccggaagcatgaatcgcttcatgcatgaacatgagtctcgaggatgggtagatgagcgagatgaggtatgcgatgcgattccccacccctgaatgagcatggtcgatctctcctcgctccatacccctgcttgtatcacaatgatggacccatgccgcgattctatttccatgcctagacacgacccttcgccgtttgaagagatcatgcggcccagttcgcagacacccataagagtccatgctacaccacctcgccagctatcttcgtacttggttcgtgtgacttctttcctttcttttcaagtccgcaatctcttactttagcatattttccttcttacaccaccgttgggatcctgcgagactggatcgtcctatctttatccccgtaatccgtcaaacactcgctaccttcacaccgagtaccgttttcaaccgctgggctgggccatttttgtatcattatcttgctacgtcattccgatcagacacagacaagcactcttcgtagcatttccaagacaaatccgcttcaacacacaaattcactatatacaatatgcagcacatgtcacgcttccagaccatccgctctcgcttttcgccgagcaatctgcggacatcgatgcgccggtcatcatcggcctcctcgcaaacgacaagttctgaatcaggctcatcttcgcctgtccacactatcaacgccgtcctcttccggcagccgtctattttggacatggaagcagagaagcagcgatcaggtgtcgagctcaacctgctcgagccgaggcccatcgtctattggggcggccttgaggagagaatgggctctttctagggcagagtccaaacctgtgatgggtgaagactctactcacatgtcggctgttagcacgagtcgtgagctaagcaccccacttcgtatcgccatctagactcgaagatatgggatgtgacaggttgctcacgtcgtcaatctgacgataggaaacctgatgaacgctcagttcgctcctccattccttagaatgcgggtgctagcaaacgaaaagaaaggaaactaggaacacattgagttatctacacaaggccctgaaaaatgatccttcgacgatgatgggtgatgaagcgacgggaattattttttgcatgagacgacacgggagttggtttggcaatcggcgcaatatggtggaggggatgatttattgatatttggattcatatacctctgaggacacaagctctcatctgctacatagagagtagagctgcgccgcactttttcggatgtggtagctactggaaactggaaacttttaatattcgatcttacaccttcgttgcacgtgtgtcgcagcatggggaatcacactttctgaggttttgacgtagactggttcaacccgaagtagatgttgattgaaaagaatcgtctatcgttttcaacattacagctttccaccccagaggcaaagatcaaagcatatgaagatctcggtcttcgctccatcgaagtaacttgaattggggtatatcttggatttttttttttccagaccaaagtgcgaaccgatgcgtcaggggcacgcctaggtagagttttgtccatgacccacctcgcctgttaccagattacgacaaagctgacacactcactgatgttcaacccctcgccacccaactcacattgccgagatctcgcctgtccattgagatacggcactagatccaaatgaactccaagagacaggtaggaggcagtattcgttcagcgaaagagatatgagacgtcttcaacagctcgccccgcttctcgactttgtcagagacatggccggccaatttgcaggttggacgtgggacatatgattattgatgttgtattttgcctgtgcagtgtttcaggccgcggctacaccctcttctttggcagcgctgtgggacgcgaagaaggcctcgttgttgtccagctcctccttaatctgcatgacggttgcggtcagcataaagtgcacattacacgcaggagagaggagatcagatagccaaagtggcaggagataggctgggggagaggcgtacgatatctagaccaccgaccagctcgccatccatccagagctgtgggtaggtgggccattcggcaaactccttcagaccctgtcggacctcgtcgtcggccaggatgttgaagaagccgtacttgacgctccgctcgcgcaggatggcgacgagctggcgcgagaagccacactgcggggcgctgggggtgcccttcatgaagagcatgacgggcgctgccttgacaagctcgccgaggcgcttgaacagctcgtccttggccttggcgggatcgacgtcgggatcgtcgagggccatcggggcggtggcgtcgttggcgtcgttggcagaggtgccgtttgtgttgggcgcggcggcggcggcgtgcttggcgtgcttctcgatggcggtgcggaccttgacggcgctgctgccgctgacggtgtcgaggacctggtcgttgcgctgcaggacgaggtaggggacggcggtgacgtcgtaggtctcggagatgtcgctgaggtcctcggcgttgatggagacccagctcgtcttgccgtcgtccgggtactcgctagcgagggtgcgcaggacggtcgtcatctgcgcacacggcgcggcccacggcgcgtggaaggatatgaccaggagcgtcgacttggggagggcgccgacgtgcgaacgccactcgtcctcggttgtgatgtccttgagtgtcgacatgctgtgggctgtggacggagggccgtgagacagaagagcaatggccaaggccccgagtctaacagatgcgaagtagacaccggcgtctttctgttgtcggtgttgggagatggtaataaacaaaagctttgctgttgtctctgctagccggtgggatggcgtctgtccggtggtgcctggtctagtattgataaccacatgggcgtcactacacgtacatgtaggtactgagtactattgcttttaaatttcgacggtttgcgaactcggcttacctgcgattgcgccagcgaggggctctcttaacgtaatgcccgctaaaaccgtggcccctcctccaacaagccaatcgcggggcatttgatgaccccctgttcccgccgctcccgctaattagacacctctgaattcatctgacaatgtcccgagtcaacatcattccatcttcaccgcccgctacctacagtctacgcacagtctcatccttccaacgacaacgatgagtgcctgtgggcaaccaagctagagtcaaccataattcgcactttgtatcgatcaagttgcacggaatgccagagatgatggcgctgcattatatcggtaagcggcgtgaggtacctaggtagttacgacatatagaatataccctcgcgtactgaataagcacatctcgcgcgtccagacacagcctacttcaagtgtaatgtaaacgttcgaaccaaacattgtgttcgtacttctccgatcgggtagtttacgtcgctacagttaatatcgaacgactgtattgtcggttcgtcgtcctatcacacgtcgccgactcatgccaggaagggcgtcatggtgggtctattctgtctactgctcgacagacggccatcgtgatagagacaacctttccttttcttgcttgaaaactacgaccactgctgctagggacatttctcgggcctacatgacctaagcgtgcctttctccttgtacctcaccccgtagttcggattgttcggattcggccattgccctgtcgttgttggtaagtcgagagtcgagagccgtaggagtaatcaactcatatatggtgagctcgccagacatcatgtgactacgccagcaatatgctggcctgaaagtgttcggggttgatggtaatggcgtcacatgtagtaatatacctcttcgaccgccatcgagtaccaagccaatcatctcctgaggtataatagaaatactgcttcgcatcctcgttgactatagtccaggcattttcttcccctcggccaggtcaaagccggagaaagggatggagacgcagaaatcggcatggttgagccttggctccctctccaatctgctgctctagccagaaggacgcctcactctcccgctgtgcagttcaagcgctctagatagggacactggaccgggtgtcgtcgtcttcatcctccatcatgagctccgtcgcatcgtggccgtcacgctccacggcctcgcgttcccgtggcttgatactggcttcggcggcgagcacggctttgcggcgctgccaccagtcttgctcgatgcgctgcgcttggttcacgagcgtgtccttctccagccactcttggcggtatatctcctccgcctcctcacactcgcgccgcagcatgtcgccctctttggtggcccacttgacgtgcgccacacacagccgccatagcgattccatgtccatggccaactcctggccagagaagccctgctgctcggtgagaggcgtgaagaagtccgctccgatcacgtcgctgctgtcgccgtcgtcgaccgagtcgtcttggccggccgagtgggactgtggcgtcttgatgatgatcttgagcttgttattcttcttgtcgccgtggagctgcatcgatttgggcacggggtccgaaggtcgcagggcctcggtctcgtggaccgtcctcatgtgcttggcgagagcgtcggacctcgtgaaggcgcggtcgcactctgcgagaccccaggtcagcgggcggagacgaagaaggcatgcaggtggagaaaaggggctgggtgaaggggcttgcatacctggtagatagcagtagaagggcttctcgcgggtatggcttcgcatgtgcgccttgagggcatagccgctggcgtggggcatgctcttccgggagcagccgttccactcgcaggtgtacttcttctggcgactctcgatgtggtcgttgtggatgtgctcgaccagtcggtccatgttgcccagatcgccggcgccgcagccgtcccaggcacagacggtgacctgctcctggaactcgtcctcgtcaagcttggcattgatgggggagttggggacgtcgcccgaggtgtctgaggaaatgtcgccgtcgtcaaggtcgggctcttgctcgggctcctgctcgggctcggcttctggctcggggtctatgtggacggacgacgaggcgcgcgagccgtctcgcagcttctggcgtttggaggggggcaaggcgggctcgtcgacgacgccggcgtcatcgaactcgttctcctggtcggactcgtctgacgacagcgagcttatcgccgaggatgaatccgacagcagacccatggctgaggtgaaagatgtggtggttccgtatcgtgtcaaatagctgcagatgtagaggagtggtggtggtggtcgcggtcagggcgcgcacagcccgaggacagcgaggacagcggcgtggtcgacgtgacacaacgagggctcgaacactatgcgcacgcactcacagctcataagtcaaggcgggatggacacacggcggtctacgaaaattgagggtgcaagaggcgacgcgggtgatgatcggaatggtttgccctgtcttatttcgaagctccctggccttgttgctcttgcacaacgacggcctac

SEQ ID NO: 39594 - DNA, 5349 bp, Muscodor strobelii
  misc_feature: SGI cDNA ID NO. 573780
  misc_feature: Reduced expression when VOC is produced
  misc_feature: Encodes the peptide sequence at SEQ ID NO 39595
tacctcgagccctcgcttctgattctcatcgtgctgcaagccgtgctgctcgccgtcgaggccgccaacaacgtcttcgagcccggcaacgagcgcaagccgctgtgggacccgggctcggccatcaactgggccatcctggtcctcttcatcatcttcaccctcgagatagtcgcccacgtcatcgtctccggcctggtcctgaacgccgccgagtattcctccatcgaccgcacccaaggtgtccgcaacgccatctcggaacagtacaacgccatcttccggccccagcgacatcgatccgtcaagccgccgccgcgggagcaggactacgggccgtccacctttgcccgctccttcaccaccatgatgcaccaggtgccggagacggtcgaggagcagatgcgtctgcatttggcccgccgtgcctttctccgtcacagcttcaaccgcctggatttcctcgccgtcgtctccttctggatcgcctttgtgctgagcatcactggcctcgaggccgacaagcacctgtacatttttcgaatgctgagctgtctccgcatcatccgcctgctcgctctcaccaacggcaccgccatcatcctgcgcagcttgaaaaaggccgcgcccctgctgctccgagtctcctttctcatcggcttcttctggctgctgttcgctatcgtaggcgtgcagagcttcaagtcgagtctgagccgtcaatgcgtctggctggatccgacgaatgcaaccagcttcgacgcggcttatgtgaacagtatgaccttctgcggcggccatgttgataacgataccggcaaatcggtctcgtgggtcaggtctgaggacgggctcgaatccgtgacgaacttggtgcaggcctcgggcggtgcgaagggctatctttgtccgcgaggctccatatgtttgcagcagcagagcccctttaaccagaccgtcagcttcgataatatcctccagtctctggagctggtcttcgttatcatgagtgccaacacctggtctgatctgatgtactacaccatcaattctgactatcagtcagcggcctttttctttggcgctggtatcatgattctcatgctctggttgacgaacttactcattgccgtcatcacttcatccttccaggtcatacgcgaagaaagcaaggcgagtgcttttacagatattcaggagcccttgcttgcaggtctccaagagcccccaatgcagagagtctccgcgttgcagagagtctatgacaagacggcgttcatatggattctactcatcgcctacgatctctttgctcaggcttggcggtcgtcagacatgtctgacaaaacgatacttttcatcaaaatctccgatattgtggtgacggtcctacttgacgttgaaatcgtcatccgaattgctgctaactggaaatctttccatcggaacccacggaacatcatcgattttcttctggccatagctaacacggtgattcttctgccgcccattttgaacagtgggcaaacctatgcgtggctcacaatctttcaaatcatacgcgcgtaccgtgtggtgctgagtgttcccatcacgagagacttgattctgttggtacttggcaatgccactggtatcggaaacctgattatatttgttttcctaatcacctttatcatggccatcttcgccgttcagctgttccgcggtgagatacccctgcgcgatgacgacggcaaccttctccaggtttcattctataatatctacaactccttcttgggcatgtaccagattctctccagtgagaactggacttcaatactttacaatgtcacggcttactccacttcacgccatacggcttggtacggggccatcttcctcatcgggtggttcatattggcttttttcattctcgtcaatatgtttattgctgttatacaggagaactttgacgtttcggaagacgagaaacgcttggaacaggtcaaagcctttctccagcgcaaggaactaggcagtaccaccggtagtaatgtcgccttgtcggaaatcttcgctttcggaaagaagcggcagaagagagatcctctcgactatggacccgctacgatggaaatgcttctcaaagatgcggtagttcgggaattcctagacgatcctaccgaccccctcaaccagcagcccctctcagacgaggaaaacgcggcacctggcgagaccgaaaaaccatcgggcttcatgtcgtccctggcgaggaagatcaagaaagggtttggctctggtgaaccgaacccgttctatgctagcattcagttcaacggacctaaagatacactggaccccaggcagatggcacgtcaagccatgtctgccactgtggaacgacgcaaagcacagcgagagtatctacgtcgccatcctacatataacaattctctgtacatcttcagccctctgaatccgatcaggcgactttgtcaacgcatggtcggcccaggaaggggcagcgagcggttcgatggtgtcgaacccaacaagcttgtgtggtactccttctccgttttcatctatgcggccattattgcgatggtagtgatagcgagtgttactacccctctctatcagaagctatatcttgaagcgaagcaactatccgaagctgaccgtagtgttacatggttcgtgtgggtcgatctcgcattcgctgttgtctttacggtagaagctgtgatcaaaatcatcgcggacggactgttcttcaccccgaacgcctactaccggagctcatggggcttcatagatgccgtggtgctcatcacactgtggatcaatgttctcacgctccttctcaacgatgggagcgtctcgcgggtggtcggcgcatttaaggcccttcgagcactgagactacttaacatcagcaatacggccagagatactttccactccctcatcattgtagccggctggaagatcatcagtgctgccctcgtctcgctgtctctcttgattccattcgccatctatgcccttaacctattctctggacagcttcttgcctgcaatgacggcgatcttaccagccttactgattgcgttggagagtacgcaagcgcgccgtccaatcctaattgggcgttactcgcccctcgggtcgcgcaaaatccatttttcagtttcgacgacttcgctgcctctttgttcattcttttccagatcgtgtcgcaagaaggatggatcgatgtttcttttgcggtgcagtcgattacgggccgcggtactcaaccgcaggacatggcctcgagaggcaacgcgttgtttttcgttgttttcaacttgctcggaaccgtcttcgtcttgactttgttcatatctgttttcatgcgcaactatacggaacagacgggtgttgcgttcttgacagcggagcagagaacatggctcgaacttcgcaagctcttacggcagatttcgccatcgcgtagctcctatgatgagtcagagaacaagtggaagaagtggtgccataagcgagcgattgaaaagcgaggcaaatggtacactgcaatcaccgtcgtgttggttcttcacctcattcttttgctcctcgagtactcgcccgaaccagagtggtggtctaaaacaagagacgctgtgttcctactgttcacactcatctacattgccaatgtcgtcatccgtgttgttggacttggctggacacggttcaggaggagttcctgggatgttttctcgctcgtcgctgtttttggcgcttttgggacatcggttgtcttggtcacaccacttaaagagccggaggccttcatacaacttcacaaattctttctcgttgccatcgtcctgctcttaatcccccgcaatgatgctctcgatcagttgttcaagacagcagcagcaagcttaacgaccattgtcaacatgcttgctacttggctcgtcttcttccttatcttcgctattgctctaacgcagactttcagtctaacacgcttcggtccgggggaagataacaatgtcaatttcagaaacgttccaaatgctctaattcttcttttccgcatgagtgtgggagaaggttggaatgccattatggaagactttgcccagatcaaagcacctgtctgtgtcgatcgtgacacgttcttcgatagcgactgcggaagcactgaatgggctaggacgctcttcatcgcctggaacctcatcagcatgtatatcttcgtcaatctctttatctctctcatctacgagagtttcagttacgtgtaccagcgctcaagcgggatggcacatatcgatcgcgatgaaattcgaagattcaaagaagcttggcggagtgttgatcccgcagggacaggctttatttcaaaggaatcgtttcctaggctcctcggtgaaatatctggcgtcttcgagatgcgtatctacgaccctgaggactctgttcgtcgcatcctagaagatgtgcgaggcagcgatcaggaactcggtcgccacgcttccatcgccacagccagcgacctcagtggcgttgatattcagaaactgaacagaaggcttgcctcgattgacttatacaaggttcgacaaaggcgacgccgtttcaacatattctacgaggaagtcatggtttctgcggaccccgaccgtggcatctcgtttacgtcagtgctcatgattatggcacattacaacatcatcagcgatagcaaaagtctaaagctcgaggagttccttcggcgtcgtgccaggctccaacgagtggaggaagaagtgaaccgaaggaccgtccttggatttttcgacacgctgtattattcccggcgattcagacgccacatggataagaaacgttcgggccgtatgacggcgattccacagttagatatacccgatatctttgtcgatgacgagagcgactctccacgcactcgagccacgccacaacggacgaccatggcggtaccgccaatccagacgggtggatcaactctactgagcgtctctgatgttaggcgacctcatcaccagagttggtcatcaggggcggatatttctacatatgacccagcacattcacatccgcttagtgctcctcgggcaccaccaacgatgcctagcaatcgtcctgaaggcacgggccatggttttgatgtacaagacaacgcggcatctactacacgcagcaggcagaatagcgaagtgagccccgcgcagctaaggagcttcctcgatgattccgtatgggctgaaagcattcgccggagcgcgacagtacggaagtctgtccgacattcagactggagcggccggcgttga

SEQ ID NO: 39595 - protein, 1782 aa, Muscodor strobelii
  misc_feature: SGI Peptide ID NO. 573780
  misc_feature (899)..(1129): Pfam Id: PF00520 Pfam Desc: Ion transport protein
  misc_feature (45)..(379): Pfam Id: PF00520 Pfam Desc: Ion transport protein
  misc_feature (457)..(648): Pfam Id: PF00520 Pfam Desc: Ion transport protein
  misc_feature (1221)..(1425): Pfam Id: PF00520 Pfam Desc: Ion transport protein
  misc_feature (1)..(1776): NCBI GI: 46108964 Blast Desc: FG01364.1 [Gibberella zeae PH-1]
  misc_feature (1)..(1772): NCBI GI: 171680301 Blast Desc: protein product [Podospora anserina] gi|170939777|emb|CAP65003.1| protein product [Podospora anserina]
  misc_feature (1)..(1781): NCBI GI: 39941464 Blast Desc: MGG_05643 [Magnaporthe grisea 70-15] gi|145022329|gb|EDK06349.1| MGG_05643 [Magnaporthe grisea 70-15]
  misc_feature (203)..(1778): NCBI GI: 164427736 Blast Desc: NCU02762 [Neurospora crassa OR74A] gi|157071864|gb|EAA34496.2| NCU02762 [Neurospora crassa OR74A]
  misc_feature (1)..(1780): NCBI GI: 116206908 Blast Desc: CHGG_02747 [Chaetomium globosum CBS 148.51] gi|88183344|gb|EAQ90812.1| CHGG_02747 [Chaetomium globosum CBS 148.51]
  misc_feature (1)..(1772): NCBI GI: 119495760 Blast Desc: calcium channel subunit Cch1 [Neosartorya fischeri NRRL 181] gi|119412820|gb|EAW22761.1| calcium channel subunit Cch1 [Neosartorya fischeri NRRL 181]
  misc_feature (3)..(1772): NCBI GI: 119184281 Blast Desc: CIMG_06961 [Coccidioides immitis RS]
  misc_feature (3)..(1772): NCBI GI: 240109827 Blast Desc: cation channel family protein [Coccidioides posadasii C735 delta SOWgp]
  misc_feature (1)..(1772): NCBI GI: 70995442 Blast Desc: calcium channel subunit Cch1 [Aspergillus fumigatus Af293] gi|66850111|gb|EAL90438.1| calcium channel subunit Cch1 [Aspergillus fumigatus Af293] gi|159131231|gb|EDP56344.1| calcium
  misc_feature (3)..(1772): NCBI GI: 212542565 Blast Desc: calcium channel subunit Cch1 [Penicillium marneffei ATCC 18224] gi|210066344|gb|EEA20437.1| calcium channel subunit Cch1 [Penicillium marneffei ATCC 18224]
  misc_feature: Useful for introducing or modulating the production of volatile compounds
YLEPSLLILIVLQAVLLAVEAANNVFEPGNERKPLWDPGSAINWAILVLFIIFTLEIVAHVIVSGLVLNAAEYSSIDRTQGVRNAISEQYNAIFRPQRHRSVKPPPREQDYGPSTFARSFTTMMHQVPETVEEQMRLHLARRAFLRHSFNRLDFLAVVSFWIAFVLSITGLEADKHLYIFRMLSCLRIIRLLALTNGTAIILRSLKKAAPLLLRVSFLIGFFWLLFAIVGVQSFKSSLSRQCVWLDPTNATSFDAAYVNSMTFCGGHVDNDTGKSVSWVRSEDGLESVTNLVQASGGAKGYLCPRGSICLQQQSPFNQTVSFDNILQSLELVFVIMSANTWSDLMYYTINSDYQSAAFFFGAGIMILMLWLTNLLIAVITSSFQVIREESKASAFTDIQEPLLAGLQEPPMQRVSALQRVYDKTAFIWILLIAYDLFAQAWRSSDMSDKTILFIKISDIVVTVLLDVEIVIRIAANWKSFHRNPRNIIDFLLAIANTVILLPPILNSGQTYAWLTIFQIIRAYRVVLSVPITRDLILLVLGNATGIGNLIIFVFLITFIMAIFAVQLFRGEIPLRDDDGNLLQVSFYNIYNSFLGMYQILSSENWTSILYNVTAYSTSRHTAWYGAIFLIGWFILAFFILVNMFIAVIQENFDVSEDEKRLEQVKAFLQRKELGSTTGSNVALSEIFAFGKKRQKRDPLDYGPATMEMLLKDAVVREFLDDPTDPLNQQPLSDEENAAPGETEKPSGFMSSLARKIKKGFGSGEPNPFYASIQFNGPKDTLDPRQMARQAMSATVERRKAQREYLRRHPTYNNSLYIFSPLNPIRRLCQRMVGPGRGSERFDGVEPNKLVWYSFSVFIYAAIIAMVVIASVTTPLYQKLYLEAKQLSEADRSVTWFVWVDLAFAVVFTVEAVIKIIADGLFFTPNAYYRSSWGFIDAVVLITLWINVLTLLLNDGSVSRVVGAFKALRALRLLNISNTARDTFHSLIIVAGWKIISAALVSLSLLIPFAIYALNLFSGQLLACNDGDLTSLTDCVGEYASAPSNPNWALLAPRVAQNPFFSFDDFAASLFILFQIVSQEGWIDVSFAVQSITGRGTQPQDMASRGNALFFVVFNLLGTVFVLTLFISVFMRNYTEQTGVAFLTAEQRTWLELRKLLRQISPSRSSYDESENKWKKWCHKRAIEKRGKWYTAITVVLVLHLILLLLEYSPEPEWWSKTRDAVFLLFTLIYIANVVIRVVGLGWTRFRRSSWDVFSLVAVFGAFGTSVVLVTPLKEPEAFIQLHKFFLVAIVLLLIPRNDALDQLFKTAAASLTTIVNMLATWLVFFLIFAIALTQTFSLTRFGPGEDNNVNFRNVPNALILLFRMSVGEGWNAIMEDFAQIKAPVCVDRDTFFDSDCGSTEWARTLFIAWNLISMYIFVNLFISLIYESFSYVYQRSSGMAHIDRDEIRRFKEAWRSVDPAGTGFISKESFPRLLGEISGVFEMRIYDPEDSVRRILEDVRGSDQELGRHASIATASDLSGVDIQKLNRRLASIDLYKVRQRRRRFNIFYEEVMVSADPDRGISFTSVLMIMAHYNIISDSKSLKLEEFLRRRARLQRVEEEVNRRTVLGFFDTLYYSRRFRRHMDKKRSGRMTAIPQLDIPDIFVDDESDSPRTRATPQRTTMAVPPIQTGGSTLLSVSDVRRPHHQSWSSGADISTYDPAHSHPLSAPRAPPTMPSNRPEGTGHGFDVQDNAASTTRSRQNSEVSPAQLRSFLDDSVWAESIRRSATVRKSVRHSDWSGRR

SEQ ID NO: 39596 - DNA, 6088 bp, Muscodor strobelii
  misc_feature: SGI EST ID NO. CUFF.96664.2
  misc_feature: Variant of the nucleotide sequence at SEQ ID NO 39594
cctcgagccctcgcttctgattctcatcgtgctgcaagccgtgctgctcgccgtcgaggccgccaacaacgtcttcgagcccggcaacgagcgcaagccgctgtgggacccgggctcggccatcaactgggccatcctggtcctcttcatcatcttcaccctcgagatagtcgcccacgtcatcgtctccggcctggtcctgaacgccgccgagtattcctccatcgaccgcacccaaggtgtccgcaacgccatctcggaacagtacaacgccatcttccggccccagcgacatcgatccgtcaagccgccgccgcgggagcaggactacgggccgtccacctttgcccgctccttcaccaccatgatgcaccaggtgccggagacggtcgaggagcagatgcgtctgcatttggcccgccgtgcctttctccgtcacagcttcaaccgcctggatttcctcgccgtcgtctccttctggatcgcctttgtgctgagcatcactggcctcgaggccgacaagcacctgtacatttttcgaatgctgagctgtctccgcatcatccgcctgctcgctctcaccaacggcaccgccatcatcctgcgcagcttgaaaaaggccgcgcccctgctgctccgagtctcctttctcatcggcttcttctggctgctgttcgctatcgtaggcgtgcagagcttcaagtcgagtctgagccgtcaatgcgtctggctggatccgacgaatgcaaccagcttcgacgcggcttatgtgaacagtatgaccttctgcggcggccatgttgataacgataccggcaaatcggtctcgtgggtcaggtctgaggacgggctcgaatccgtgacgaacttggtgcaggcctcgggcggtgcgaagggctatctttgtccgcgaggctccatatgtttgcagcagcagagcccctttaaccagaccgtcagcttcgataatatcctccagtctctggagctggtcttcgttatcatgagtgccaacacctggtctgatctgatgtactacaccatcaattctgactatcagtcagcggcctttttctttggcgctggtatcatgattctcatgctctggttgacgaacttactcattgccgtcatcacttcatccttccaggtcatacgcgaagaaagcaaggcgagtgcttttacagatattcaggagcccttgcttgcaggtctccaagagcccccaatgcagagagtctccgcgttgcagagagtctatgacaagacggcgttcatatggattctactcatcgcctacgatctctttgctcaggcttggcggtcgtcagacatgtctgacaaaacgatacttttcatcaaaatctccgatattgtggtgacggtcctacttgacgttgaaatcgtcatccgaattgctgctaactggaaatctttccatcggaacccacggaacatcatcgattttcttctggccatagctaacacggtgattcttctgccgcccattttgaacagtgggcaaacctatgcgtggctcacaatctttcaaatcatacgcgcgtaccgtgtggtgctgagtgttcccatcacgagagacttgattctgttggtacttggcaatgccactggtatcggaaacctgattatatttgttttcctaatcacctttatcatggccatcttcgccgttcagctgttccgcggtgagatacccctgcgcgatgacgacggcaaccttctccaggtttcattctataatatctacaactccttcttgggcatgtaccagattctctccagtgagaactggacttcaatactttacaatgtcacggcttactccacttcacgccatacggcttggtacggggccatcttcctcatcgggtggttcatattggcttttttcattctcgtcaatatgtttattgctgttatacaggagaactttgacgtttcggaagacgagaaacgcttggaacaggtcaaagcctttctccagcgcaaggaactaggcagtaccaccggtagtaatgtcgccttgtcggaaatcttcgctttcggaaagaagcggcagaagagagatcctctcgactatggacccgctacgatggaaatgcttctcaaagatgcggtagttcgggaattcctagacgatcctaccgaccccctcaaccagcagcccctctcagacgaggaaaacgcggcacctggcgagaccgaaaaaccatcgggcttcatgtcgtccctggcgaggaagatcaagaaagggtttggctctggtgaaccgaacccgttctatgctagcattcagttcaacggacctaaagatacactggaccccaggcagatggcacgtcaagccatgtctgccactgtggaacgacgcaaagcacagcgagagtatctacgtcgccatcctacatataacaattctctgtacatcttcagccctctgaatccgatcaggcgactttgtcaacgcatggtcggcccaggaaggggcagcgagcggttcgatggtgtcgaacccaacaagcttgtgtggtactccttctccgttttcatctatgcggccattattgcgatggtagtgatagcgagtgttactacccctctctatcagaagctatatcttgaagcgaagcaactatccgaagctgaccgtagtgttacatggttcgtgtgggtcgatctcgcattcgctgttgtctttacggtagaagctgtgatcaaaatcatcgcggacggactgttcttcaccccgaacgcctactaccggagctcatggggcttcatagatgccgtggtgctcatcacactgtggatcaatgttctcacgctccttctcaacgatgggagcgtctcgcgggtggtcggcgcatttaaggcccttcgagcactgagactacttaacatcagcaatacggccagagatactttccactccctcatcattgtagccggctggaagatcatcagtgctgccctcgtctcgctgtctctcttgattccattcgccatctatgcccttaacctattctctggacagcttcttgcctgcaatgacggcgatcttaccagccttactgattgcgttggagagtacgcaagcgcgccgtccaatcctaattgggcgttactcgcccctcgggtcgcgcaaaatccatttttcagtttcgacgacttcgctgcctctttgttcattcttttccagatcgtgtcgcaagaaggatggatcgatgtttcttttgcggtgcagtcgattacgggccgcggtactcaaccgcaggacatggcctcgagaggcaacgcgttgtttttcgttgttttcaacttgctcggaaccgtcttcgtcttgactttgttcatatctgttttcatgcgcaactatacggaacagacgggtgttgcgttcttgacagcggagcagagaacatggctcgaacttcgcaagctcttacggcagatttcgccatcgcgtagctcctatgatgagtcagagaacaagtggaagaagtggtgccataagcgagcgattgaaaagcgaggcaaatggtacactgcaatcaccgtcgtgttggttcttcacctcattcttttgctcctcgagtactcgcccgaaccagagtggtggtctaaaacaagagacgctgtgttcctactgttcacactcatctacattgccaatgtcgtcatccgtgttgttggacttggctggacacggttcaggaggagttcctgggatgttttctcgctcgtcgctgtttttggcgcttttgggacatcggttgtcttggtcacaccacttaaagagccggaggccttcatacaacttcacaaattctttctcgttgccatcgtcctgctcttaatcccccgcaatgatgctctcgatcagttgttcaagacagcagcagcaagcttaacgaccattgtcaacatgcttgctacttggctcgtcttcttccttatcttcgctattgctctaacgcagactttcagtctaacacgcttcggtccgggggaagataacaatgtcaatttcagaaacgttccaaatgctctaattcttcttttccgcatgagtgtgggagaaggttggaatgccattatggaagactttgcccagatcaaagcacctgtctgtgtcgatcgtgacacgttcttcgatagcgactgcggaagcactgaatgggctaggacgctcttcatcgcctggaacctcatcagcatgtatatcttcgtcaatctctttatctctctcatctacgagagtttcagttacgtgtaccagcgctcaagcgggatggcacatatcgatcgcgatgaaattcgaagattcaaagaagcttggcggagtgttgatcccgcagggacaggctttatttcaaaggaatcgtttcctaggctcctcggtgaaatatctggcgtcttcgagatgcgtatctacgaccctgaggactctgttcgtcgcatcctagaagatgtgcgaggcagcgatcaggaactcggtcgccacgcttccatcgccacagccagcgacctcagtggcgttgatattcagaaactgaacagaaggcttgcctcgattgacttatacaaggttcgacaaaggcgacgccgtttcaacatattctacgaggaagtcatggtttctgcggaccccgaccgtggcatctcgtttacgtcagtgctcatgattatggcacattacaacatcatcagcgatagcaaaagtctaaagctcgaggagttccttcggcgtcgtgccaggctccaacgagtggaggaagaagtgaaccgaaggaccgtccttggatttttcgacacgctgtattattcccggcgattcagacgccacatggataagaaacgttcgggccgtatgacggcgattccacagttagatatacccgatatctttgtcgatgacgagagcgactctccacgcactcgagccacgccacaacggacgaccatggcggtaccgccaatccagacgggtggatcaactctactgagcgtctctgatgttaggcgacctcatcaccagagttggtcatcaggggcggatatttctacatatgacccagcacattcacatccgcttagtgctcctcgggcaccaccaacgatgcctagcaatcgtcctgaaggcacgggccatggttttgatgtacaagacaacgcggcatctactacacgcagcaggcagaatagcgaagtgagccccgcgcagctaaggagcttcctcgatgattccgtatgggctgaaagcattcgccggagcgcgacagtacggaagtctgtccgacattcagactggagcggccggcgttgacagaaaatgataatgagttacgtgatacaaagttacgagaatagcttgggaggtatacgctgggttcccccggggcggagttggatatatataagatgaacacaacaggttcctagacacccagactgaacctggaggaaacatagcatggcgttgaggagttaattacaaagatgtgacatcagtccatgcaaagacatgaagatgataagggagggcgcggatgaaaaacatcctgtcatttggacttactgctggtcgaagggcaagagagatatgctatgagaattcacgaaacgctcaaacatggcataggagatgaacttgttcgacgtgtttgagccgatctcgttgaccccgaggatgttttaattgaggcaatcgcacaatagctgatcaatgtcattggaattaactctagccaagagtcaagacccccatagtcattcatgacgtgctgtagccttacctgattgcttcatgttgacgagatgattttcgcacttcaagcaagaggagatagcaattggatgcccgatttcaggtgcaagggtggtgacagatgctaatctttaactttgcgaaaggcaccaaagttgcgaaacaaagatcaatcggtggcaatcacattctggtgattcgagagactacctaggaaatgaagtggttgaggaacgagtaaagggaagcttcaatacggaggtagtacgatacccatgctcccctgtctcatcccccctc

SEQ ID NO: 39597 - DNA, 528 bp, Muscodor strobelii
  misc_feature: SGI cDNA ID NO. 573781
  misc_feature: Encodes the peptide sequence at SEQ ID NO 39598
tgcgacaactgcgaggcgagtaccatcttgcagatggtggactttacgcagtatgctacagcggcgttaaagcttgtgcaacgttatgggaagctgacgccgacgcaatgcactaatattttgatgggaaggaagacgaaattcaatcagaaaggtctcgaaacgtaccatggtctagccaagcatattgcgaagcacgatatacatcgtgttcttggtagactaactgccgatgatgtattgaaagaagaaaatattatctatcgtagcagcgggatagctatacagtatcttcggcttggccctgaagcttcttcgttcctctctggtgagcgcagattcgaactagctacaacaagcaagggcgcgagcgacgaaaatactccatcgacagtagagaagcttcgtagcaggataacggctcagccgacggaacggaaagttaggttcgctgctgaaagtgagctaaacgatgatcaggatgacaaaggggaagtctccaaatatttccggaagagcacatcataa

SEQ ID NO: 39598 - protein, 175 aa, Muscodor strobelii
  misc_feature: SGI Peptide ID NO. 573781
  misc_feature (14)..(120): Pfam Id: PF09382 Pfam Desc: RQC domain
  misc_feature (1)..(148): NCBI GI: 46107336 Blast Desc: FG00551.1 [Gibberella zeae PH-1]
  misc_feature (1)..(126): NCBI GI: 256735226 Blast Desc: NECHADRAFT_30968 [Nectria haematococca mpVI 77-13-4]
  misc_feature (1)..(148): NCBI GI: 256721447 Blast Desc: NECHADRAFT_88354 [Nectria haematococca mpVI 77-13-4]
  misc_feature (1)..(117): NCBI GI: 256725172 Blast Desc: NECHADRAFT_64925 [Nectria haematococca mpVI 77-13-4]
  misc_feature (1)..(138): NCBI GI: 39941578 Blast Desc: MGG_05700 [Magnaporthe grisea 70-15] gi|145022394|gb|EDK06414.1| MGG_05700 [Magnaporthe grisea 70-15]
  misc_feature (1)..(138): NCBI GI: 261356227 Blast Desc: ATP-dependent helicase SGS1 [Verticillium albo-atrum VaMs.102]
  misc_feature (1)..(118): NCBI GI: 119193364 Blast Desc: CIMG_01059 [Coccidioides immitis RS]
  misc_feature (1)..(118): NCBI GI: 240105739 Blast Desc: DNA helicase recq1, [Coccidioides posadasii C735 delta SOWgp]
  misc_feature (1)..(118): NCBI GI: 258574619 Blast Desc: UREG_01007 [Uncinocarpus reesii 1704] gi|237901757|gb|EEP76158.1| UREG_01007 [Uncinocarpus reesii 1704]
  misc_feature (1)..(130): NCBI GI: 255932597 Blast Desc: Pc12g10330 [Penicillium chrysogenum Wisconsin 54-1255] gi|211582474|emb|CAP80660.1| Pc12g10330 [Penicillium chrysogenum Wisconsin 54-1255]
CDNCEASTILQMVDFTQYATAALKLVQRYGKLTPTQCTNILMGRKTKFNQKGLETYHGLAKHIAKHDIHRVLGRLTADDVLKEENIIYRSSGIAIQYLRLGPEASSFLSGERRFELATTSKGASDENTPSTVEKLRSRITAQPTERKVRFAAESELNDDQDDKGEVSKYFRKSTS

SEQ ID NO: 39599 - DNA, 718 bp, Muscodor strobelii
  misc_feature: SGI EST ID NO. CUFF.95394.0
  misc_feature: Variant of the nucleotide sequence at SEQ ID NO 39597
atttcccaaagcgaaatgcaatgctagttgcgacaactgcgaggcgagtaccatcttgcagatggtggactttacgcagtatgctacagcggcgttaaagcttgtgcaacgttatgggaagctgacgccgacgcaatgcactaatattttgatgggaaggaagacgaaattcaatcagaaaggtctcgaaacgtaccatggtctagccaagcatattgcgaagcacgatatacatcgtgttcttggtagactaactgccgatgatgtattgaaagaagaaaatattatctatcgtagcagcgggatagctatacagtatcttcggcttggccctgaagcttcttcgttcctctctggtgagcgcagattcgaactagctacaacaagcaagggcgcgagcgacgaaaatactccatcgacagtagagaagcttcgtagcaggataacggctcagccgacggaacggaaagttaggttcgctgctgaaagtgagctaaacgatgatcaggatgacaaaggggaagtctccaaatatttccggaagagcacatcataaacgaggtcttcggaacacggcagcaaagcctcctccacgaggactgtttgaggtgtacaagtcccattcacaaacctggaggaccccacggatgactttcttgtacctggcaatcccaaccgatatcaacgcgacatgttaccgtcatctagtagataagat

SEQ ID NO: 39600 - DNA, 270 bp, Muscodor strobelii
  misc_feature: SGI cDNA ID NO. 573782
  misc_feature: Encodes the peptide sequence at SEQ ID NO 39601
atgcagctctccgccctcgtccaggtcatcctccaccacgtcgcttccagtatcgcagctcccttagaatcagacaacatcaatgctcttgcggcaagagactgtctcccagatttcaaccacacagagaccatggtctattgcggctcatttctggggctcacagccaccttgagatgcgacaacgacacaccggtgattatatgcaacgacaagggcaacacatcttgcggtgtggtcgaggggaaacggaagtgcataccaccttga

SEQ ID NO: 39601 - protein, 89 aa, Muscodor strobelii
  misc_feature: SGI Peptide ID NO. 573782
MQLSALVQVILHHVASSIAAPLESDNINALAARDCLPDFNHTETMVYCGSFLGLTATLRCDNDTPVIICNDKGNTSCGVVEGKRKCIPP

SEQ ID NO: 39602 - DNA, 291 bp, Muscodor strobelii
  misc_feature: SGI cDNA ID NO. 573783
  misc_feature: Encodes the peptide sequence at SEQ ID NO 39603
atgcattcttcaatcctcaccaagatcatcatactccacgctgcagttgtcgttgctgtgcctctcgaattagagtccaccaacacaatcgaggcaagacactgtctaacggactatttgaccggccgcagagtctattgcgggtcacacgatggatttgacgccattttggattgcaatgactatggagtagtccacacctgcaatggacgggacgacagtggacaggccgatgggtgcttctctagtcatggatatgcgcaatgctacatcgggttaagctcggaataa

SEQ ID NO: 39603 - protein, 96 aa, Muscodor strobelii
  misc_feature: SGI Peptide ID NO. 573783
MHSSILTKIIILHAAVVVAVPLELESTNTIEARHCLTDYLTGRRVYCGSHDGFDAILDCNDYGVVHTCNGRDDSGQADGCFSSHGYAQCYIGLSSE

SEQ ID NO: 39604 - DNA, 178 bp, Muscodor strobelii
  misc_feature: SGI EST ID NO. CUFF.95407.0
  misc_feature: Variant of the nucleotide sequence at SEQ ID NO 39602
cacaatcgaggcaagacactgtctaacggactatttgaccggccgcagagtctattgcgggtcacacgatggatttgacgccattttggattgcaatgactatggagtagtccacacctgcaatggacgggacgacagtggacaggccgatgggtgcttctctagtcatggatatgcg

SEQ ID NO: 39605 - DNA, 1683 bp, Muscodor strobelii
  misc_feature: SGI cDNA ID NO. 573784
  misc_feature: Encodes the peptide sequence at SEQ ID NO 39606
atggcccgcacgaggcaaactaagcttcctgtcgacggctcgtggcgcatggtcgaggaaggcgagaacgacagtttcgacacaacgatcattcaagatcccttcgaggacgaattcccatcaagtggacaaactcaattctcatcaaattcgtctcaaggctttgggtcgcaggatagcatccgcgactttgctaataacgccgacgaggatcaggttattctgcgcgcgccttttcaaccatctttcatctcatcacgacacgcatcagcagacaaggaccgcactccggtcccagagttcttcatgcctactccagagatcgcaagtgctcggaatccgagcagccggtcatcgcgcactgttcggcctgaagatgcgcaagtccggaaaagaatgactcgacctgagtcgaatgatgccaagtctagctatttccctgcgcaaggatcaagtgggcaaaaacgcggacgatcacaagacgatgtgtcgcaagcaccaagcgtcgctcagagattcggtaataccgcacttgagtgtgcatatggcatgttcgcctggacgtcgtctgtgcttggtctggtattccggctcatgaagtatcccattgccatgatactggcagcttatctgggcctcggccttctaattgtggtcaagaacatgatgacccagtcaatcacagcatctctgtcgccaatatgtcgagtgccaggagtatcgactgtattaccgctttgctcgagtgcaaccgatagcgcacatgttgagtttcaggagcttatgacggcacaggacaagtttgagcaggtgctagaagactcggcgcagggcgtatcgttgccaatggacatgaagcgatcagaagcatctgtgcgagacttacggactatggtcaaatacagcgacttaccagcacgcgacgaactagtgtttgaatttgatggctacatcgacacagttcgccaagtatccagcgacttgcaatcattcaacacgcatgtcggcagtgcagtcgacaacgtcattagcatcaatcgctggacatcacgatacatcgactcggtcgcagcaagtagggaaagcagtggcggcctcatatccaagatcttctggcctttccaacccgcagtcttcgatgaacaaatggtggtggacaaatacatcgaacatacggctctcgtgtcggataagattgccagtctaattctcgaggcacaaatgacactgggcttattgaagcgagcggaagatcacctcatgatgatacacgaaaacgttgtccgaagcgacagagaagtcagtgacaagcgcagcgaggtattatgggacctttggacgctcgtgggcgctaataacggccgcttgcataacctcaaggcacagctttcgcttctacgacaagtcgagagccagcggacttcggctgtctcgcagcttaccaatctcattctcgatttgggggatattcagacgaagttaagtgatcttcgggatcgtgtcgctgcgccggagttgttgcaggatcacacatcgataccgctgattgttcatattgacaccatcaatgctggcgttgagagactggagtctgcgaggagccgtatccgggcggaggagaatgagagactacagcaggcgcttgcaagagctagggaggacgatcgattgattgagggatag

SEQ ID NO: 39606 - protein, 560 aa, Muscodor strobelii
  misc_feature: SGI Peptide ID NO. 573784
  misc_feature (5)..(559): NCBI GI: 39951361 Blast Desc: MGG_01323 [Magnaporthe grisea 70-15] gi|145020861|gb|EDK04990.1| MGG_01323 [Magnaporthe grisea 70-15]
  misc_feature (1)..(560): NCBI GI: 46107686 Blast Desc: FG00726.1 [Gibberella zeae PH-1]
  misc_feature (4)..(560): NCBI GI: 256734768 Blast Desc: NECHADRAFT_75364 [Nectria haematococca mpVI 77-13-4]
  misc_feature (11)..(554): NCBI GI: 85116054 Blast Desc: NCU03128 [Neurospora crassa OR74A] gi|28926786|gb|EAA35751.1| conserved [Neurospora crassa OR74A] gi|38567276|emb|CAE76566.1| [Neurospora crassa]
  misc_feature (12)..(559): NCBI GI: 171687737 Blast Desc: protein product [Podospora anserina] gi|170943830|emb|CAP69482.1| protein product [Podospora anserina]
  misc_feature (185)..(560): NCBI GI: 156053916 Blast Desc: SS1G_05806 [Sclerotinia sclerotiorum 1980] gi|154703586|gb|EDO03325.1| SS1G_05806 [Sclerotinia sclerotiorum 1980]
  misc_feature (264)..(560): NCBI GI: 154295619 Blast Desc: BC1G_13080 [Botryotinia fuckeliana B05.10] gi|150843960|gb|EDN19153.1| BC1G_13080 [Botryotinia fuckeliana B05.10]
  misc_feature (189)..(533): NCBI GI: 169621987 Blast Desc: SNOG_14206 [Phaeosphaeria nodorum SN15] gi|160704671|gb|EAT78443.2| SNOG_14206 [Phaeosphaeria nodorum SN15]
  misc_feature (231)..(558): NCBI GI: 189197597 Blast Desc: conserved [Pyrenophora tritici-repentis Pt-1C-BFP] gi|187981084|gb|EDU47710.1| conserved [Pyrenophora tritici-repentis Pt-1C-BFP]
  misc_feature (4)..(261): NCBI GI: 261355162 Blast Desc: conserved [Verticillium albo-atrum VaMs.102]
MARTRQTKLPVDGSWRMVEEGENDSFDTTIIQDPFEDEFPSSGQTQFSSNSSQGFGSQDSIRDFANNADEDQVILRAPFQPSFISSRHASADKDRTPVPEFFMPTPEIASARNPSSRSSRTVRPEDAQVRKRMTRPESNDAKSSYFPAQGSSGQKRGRSQDDVSQAPSVAQRFGNTALECAYGMFAWTSSVLGLVFRLMKYPIAMILAAYLGLGLLIVVKNMMTQSITASLSPICRVPGVSTVLPLCSSATDSAHVEFQELMTAQDKFEQVLEDSAQGVSLPMDMKRSEASVRDLRTMVKYSDLPARDELVFEFDGYIDTVRQVSSDLQSFNTHVGSAVDNVISINRWTSRYIDSVAASRESSGGLISKIFWPFQPAVFDEQMVVDKYIEHTALVSDKIASLILEAQMTLGLLKRAEDHLMMIHENVVRSDREVSDKRSEVLWDLWTLVGANNGRLHNLKAQLSLLRQVESQRTSAVSQLTNLILDLGDIQTKLSDLRDRVAAPELLQDHTSIPLIVHIDTINAGVERLESARSRIRAEENERLQQALARAREDDRLIEG

SEQ ID NO: 39607 - DNA, 2590 bp, Muscodor strobelii
  misc_feature: SGI EST ID NO. CUFF.95412.0
  misc_feature: Variant of the nucleotide sequence at SEQ ID NO 39605
cgtgtttctgaccgtgaattcatgtgaccaagtcccttgacgcaacccctgctctgcctgtttgaagggtatgggtagctcttgaacgtcattcccgtttctcatcctcaaaataattatcccgagacaacaatcgtcatattcatgcgcatcactgtacatagcaagttcgagccgcatccactgtgttccacgttgcctttcatcgcgctttcatcaacgtgcttcagccttccttccacttcccccacaacgccaagatcaccctttcaacctccattcagaggtatccgtgcctaatttgcgccttgaacctcgccttgaacttcaacccttgcctatcaacttgcttctatgagtcactcccatatctcattctggatttctggacgcgacttgttgcctgtagaatacttgcttggcactgctatataagatctctttccccacaccatatctgcatatctcagatctgcagttcactcatcaagattcaagccaccatcacaatttcgcgacgtgcctggcgcataccatacatctacttcaccctaatacttcacaacggcggtgctatcttgatacgtcttgactgatagcacatttgagaccgtgtctctagggagagcttttgggtctgagacatgccggttggatagacgcggctgagaggtaccgacataaatacagcatggcccgcacgaggcaaactaagcttcctgtcgacggctcgtggcgcatggtcgaggaaggcgagaacgacagtttcgacacaacgatcattcaagatcccttcgaggacgaattcccatcaagtggacaaactcaattctcatcaaattcgtctcaaggctttgggtcgcaggatagcatccgcgactttgctaataacgccgacgaggatcaggttattctgcgcgcgccttttcaaccatctttcatctcatcacgacacgcatcagcagacaaggaccgcactccggtcccagagttcttcatgcctactccagagatcgcaagtgctcggaatccgagcagccggtcatcgcgcactgttcggcctgaagatgcgcaagtccggaaaagaatgactcgacctgagtcgaatgatgccaagtctagctatttccctgcgcaaggatcaagtgggcaaaaacgcggacgatcacaagacgatgtgtcgcaagcaccaagcgtcgctcagagattcggtaataccgcacttgagtgtgcatatggcatgttcgcctggacgtcgtctgtgcttggtctggtattccggctcatgaagtatcccattgccatgatactggcagcttatctgggcctcggccttctaattgtggtcaagaacatgatgacccagtcaatcacagcatctctgtcgccaatatgtcgagtgccaggagtatcgactgtattaccgctttgctcgagtgcaaccgatagcgcacatgttgagtttcaggagcttatgacggcacaggacaagtttgagcaggtgctagaagactcggcgcagggcgtatcgttgccaatggacatgaagcgatcagaagcatctgtgcgagacttacggactatggtcaaatacagcgacttaccagcacgcgacgaactagtgtttgaatttgatggctacatcgacacagttcgccaagtatccagcgacttgcaatcattcaacacgcatgtcggcagtgcagtcgacaacgtcattagcatcaatcgctggacatcacgatacatcgactcggtcgcagcaagtagggaaagcagtggcggcctcatatccaagatcttctggcctttccaacccgcagtcttcgatgaacaaatggtggtggacaaatacatcgaacatacggctctcgtgtcggataagattgccagtctaattctcgaggcacaaatgacactgggcttattgaagcgagcggaagatcacctcatgatgatacacgaaaacgttgtccgaagcgacagagaagtcagtgacaagcgcagcgaggtattatgggacctttggacgctcgtgggcgctaataacggccgcttgcataacctcaaggcacagctttcgcttctacgacaagtcgagagccagcggacttcggctgtctcgcagcttaccaatctcattctcgatttgggggatattcagacgaagttaagtgatcttcgggatcgtgtcgctgcgccggagttgttgcaggatcacacatcgataccgctgattgttcatattgacaccatcaatgctggcgttgagagactggagtctgcgaggagccgtatccgggcggaggagaatgagagactacagcaggcgcttgcaagagctagggaggacgatcgattgattgagggatagagctttagtttcgcttggagccttgagacttagaaacaattggttttcttttgatagtcgttgtctggacactacggtcaagcgggagttggagttatggggttataaattgtaagattgggcacacgatgctgtagtgctagctttttcatgagcacaaataccaatgttaatgtctccttcatttcctcgttctgtatgtcggttctagagctg

SEQ ID NO: 39608 - DNA, 1512 bp, Muscodor strobelii
  misc_feature: SGI cDNA ID NO. 573785
  misc_feature: Reduced expression when VOC is produced
  misc_feature: Encodes the peptide sequence at SEQ ID NO 39609
atgctctccagaagggcagtggccattcgccaccaattccgaagccaaattccattgaacagaattcgatgccttgaacgcccatttcagaagagctggcagaggcattgcgcatcctgcgatgctcccaagcaagaagcgactgcaacagccggacttccaccaaagcccccagcagaccacagagagcttggcgtgaagcaggaactattcacaacctccatctacagcccaggctcgccaatcctcctacccaatggcgctaggatattcaaccgcctagtcgagttcctccggaaacaatatctcagatatgggttcgacgaggtcatcacgcccaccatctacaagaaggcgctctggaagcaatcaggccatctcgacaactacggcgatgacatgttcacagtgacgagcacgtcgccatcacgcagcgacgcggccgagacgggcgaagaagacgaatacggcttgaagcccatgaactgccccggccactgcctgatattcgcgtccaagaggcgcagctacaaagatctccccatccgctacgccgacttctccccgctgcaccgaaacgagatctccggcgccctgagcggcctgacgagagtgagacgattccatcaggacgacggccacatcttctgccgaccgtcacaagtcgaggaggaaatcaaacagaccttagacttcgtccgcttcgtctactccaccctgcaactaggcacctaccgcctcgcgctatccacacgaccggcagatcacttcataggagaacccgaagaatgggaagccgccgagtcagcactgagaagggcactagatgcatcaggacaagaatggacagtcaacgagggagacggcgccttctacggccccaagatcgacattgtactacgtgactcggacggaaaagagcaccagacagccacgatccagctcgacttccaactccccaagcgcttcgacctcggctacgtagcacctgcccccgaatacgagcgacgcggcgagacgaccacagatccagaggaactcctgaaaacagatctggtccgacccgttatgatacaccgtgccgtcttgggctcagtcgagcggttgatggcccttctcatcgagcactacgacggcaagtggccattctggcttaatcccaaacaagtcgtgatcatgaccatcagttcgaaggaacatgttcttcagcacgcaaagcgggcgcgggacatcctgttaggtcgtccctcaagcaggaaccagacttgcgatccttggaaccctacgggcttgaccgtcgatatcgacgacaccggccgctcctttcccagaaagcttgtcgatgcgagggccaagggctacggagtcatggttgtggttggccccaaagaagctgagaacggcaccctgcacatagacgcctcgggcttgggggtgggctctcagtacaaggtttatgatcccttgacgttgaagaaggtcctcatggagaaagtggcgttgtatgaatag

SEQ ID NO: 39609 - protein, 503 aa, Muscodor strobelii
  misc_feature: SGI Peptide ID NO. 573785
  misc_feature (90)..(268): Pfam Id: PF00587 Pfam Desc: tRNA synthetase class II core domain (G, H, P, S and T)
  misc_feature (389)..(470): Pfam Id: PF03129 Pfam Desc: Anticodon binding domain
  misc_feature (1)..(503): NCBI GI: 38567275 Blast Desc: related to threonine--tRNA ligase [Neurospora crassa]
  misc_feature (34)..(503): NCBI GI: 164427281 Blast Desc: threonyl-tRNA synthetase, mitochondrial precursor [Neurospora crassa OR74A] gi|157071680|gb|EAA35752.2| threonyl-tRNA synthetase, mitochondrial precursor [Neurospora
  misc_feature (56)..(467): NCBI GI: 256734774 Blast Desc: NECHADRAFT_31483 [Nectria haematococca mpVI 77-13-4]
  misc_feature (73)..(478): NCBI GI: 116180492 Blast Desc: CHGG_00874 [Chaetomium globosum CBS 148.51] gi|88185171|gb|EAQ92639.1| CHGG_00874 [Chaetomium globosum CBS 148.51]
  misc_feature (56)..(467): NCBI GI: 46107732 Blast Desc: FG00749.1 [Gibberella zeae PH-1]
  misc_feature (35)..(477): NCBI GI: 156053914 Blast Desc: SS1G_05805 [Sclerotinia sclerotiorum 1980] gi|154703585|gb|EDO03324.1| SS1G_05805 [Sclerotinia sclerotiorum 1980]
  misc_feature (35)..(503): NCBI GI: 171687735 Blast Desc: protein product [Podospora anserina] gi|170943829|emb|CAP69481.1| protein product [Podospora anserina]
  misc_feature (90)..(480): NCBI GI: 154295615 Blast Desc: BC1G_13078 [Botryotinia fuckeliana B05.10] gi|150843958|gb|EDN19151.1| BC1G_13078 [Botryotinia fuckeliana B05.10]
  misc_feature (2)..(482): NCBI GI: 169621989 Blast Desc: SNOG_14207 [Phaeosphaeria nodorum SN15] gi|111057324|gb|EAT78444.1| SNOG_14207 [Phaeosphaeria nodorum SN15]
  misc_feature (27)..(472): NCBI GI: 189197599 Blast Desc: threonyl-tRNA synthetase [Pyrenophora tritici-repentis Pt-1C-BFP] gi|187981085|gb|EDU47711.1| threonyl-tRNA synthetase [Pyrenophora tritici-repentis Pt-1C-BFP]
  misc_feature (54)..(502): SWISSPROT Homolog: EC 6.1.1.3 Threonine--tRNA ligase
  misc_feature: Useful for introducing or modulating the production of volatile compounds
MLSRRAVAIRHQFRSQIPLNRIRCLERPFQKSWQRHCASCDAPKQEATATAGLPPKPPADHRELGVKQELFTTSIYSPGSPILLPNGARIFNRLVEFLRKQYLRYGFDEVITPTIYKKALWKQSGHLDNYGDDMFTVTSTSPSRSDAAETGEEDEYGLKPMNCPGHCLIFASKRRSYKDLPIRYADFSPLHRNEISGALSGLTRVRRFHQDDGHIFCRPSQVEEEIKQTLDFVRFVYSTLQLGTYRLALSTRPADHFIGEPEEWEAAESALRRALDASGQEWTVNEGDGAFYGPKIDIVLRDSDGKEHQTATIQLDFQLPKRFDLGYVAPAPEYERRGETTTDPEELLKTDLVRPVMIHRAVLGSVERLMALLIEHYDGKWPFWLNPKQVVIMTISSKEHVLQHAKRARDILLGRPSSRNQTCDPWNPTGLTVDIDDTGRSFPRKLVDARAKGYGVMVVVGPKEAENGTLHIDASGLGVGSQYKVYDPLTLKKVLMEKVALYE

SEQ ID NO: 39610 - DNA, 657 bp, Muscodor strobelii
  misc_feature: SGI cDNA ID NO. 573786
  misc_feature: Encodes the peptide sequence at SEQ ID NO 39611
atgacctcaccagcaacctccgagggccaaggcacaccagccgccgacaaagatggcgataatgtcgagaaaccccgtcttaccgaggaggagaaaaaaaagaatcacatcgactcagaaaagaagcgacgagaggctatccgtgctggttttgatcaactgtgcaaagtcgtcccaggtctcgagggccacgcaagatctgagggccacgtcctgcagaagactgtcgagtacgctatggagcagatgcgcgagcgaagacgactcctcgccaaggtcgaggcgaagggcgttccttttgagaaatgggctcacctccgaatggacttcggaccactcgaggagctagaacgtcgccaggccgcacgtaaggccgaagacgagaaaaatgccgaggaattcaacgcactgtaccacagaaacccgaggaccaaaagggaagacagagacgctgtgaaggaaggctctcggaagaaagccaagaagtctggtgctaatggccatcggaacggtgcctcaagtaaggacagcagtggcactatgatcgaagatgatgtttatgacgcgactacacccgaaaatgacaaagaacaggagactgcgattaagcaggaggatgaagatgacagtatggctgatcccagtcctgtcgattga

SEQ ID NO: 39611 - protein, 218 aa, Muscodor strobelii
  misc_feature: SGI Peptide ID NO. 573786
  misc_feature (32)..(84): Pfam Id: PF00010 Pfam Desc: Helix-loop-helix DNA-binding domain
  misc_feature (32)..(78): Pfam Id: PF00010 Pfam Desc: Helix-loop-helix DNA-binding domain
  misc_feature (1)..(97): NCBI GI: 46107734 Blast Desc: FG00750.1 [Gibberella zeae PH-1]
  misc_feature (12)..(97): NCBI GI: 115397639 Blast Desc: ATEG_05233 [Aspergillus terreus NIH2624] gi|114192602|gb|EAU34302.1| ATEG_05233 [Aspergillus terreus NIH2624]
  misc_feature (1)..(97): NCBI GI: 261358831 Blast Desc: helix-loop-helix DNA-binding domain-containing protein [Verticillium albo-atrum VaMs.102]
  misc_feature (1)..(97): NCBI GI: 256735489 Blast Desc: NECHADRAFT_75378 [Nectria haematococca mpVI 77-13-4]
  misc_feature (5)..(97): NCBI GI: 212531719 Blast Desc: protein max, [Penicillium marneffei ATCC 18224] gi|210071380|gb|EEA25469.1| protein max, [Penicillium marneffei ATCC 18224]
  misc_feature (1)..(97): NCBI GI: 240274608 Blast Desc: helix-loop-helix DNA-binding domain-containing protein [Ajellomyces capsulatus H143]
  misc_feature (14)..(97): NCBI GI: 225561506 Blast Desc: helix-loop-helix DNA-binding domain-containing protein [Ajellomyces capsulatus G186AR]
  misc_feature (14)..(97): NCBI GI: 154282759 Blast Desc: conserved [Ajellomyces capsulatus NAm1] gi|150410355|gb|EDN05743.1| conserved [Ajellomyces capsulatus NAm1]
  misc_feature (2)..(97): NCBI GI: 255930457 Blast Desc: Pc06g01830 [Penicillium chrysogenum Wisconsin 54-1255] gi|211581401|emb|CAP79176.1| Pc06g01830 [Penicillium chrysogenum Wisconsin 54-1255]
  misc_feature (23)..(97): NCBI GI: 226278798 Blast Desc: conserved [Paracoccidioides brasiliensis Pb01]
MTSPATSEGQGTPAADKDGDNVEKPRLTEEEKKKNHIDSEKKRREAIRAGFDQLCKVVPGLEGHARSEGHVLQKTVEYAMEQMRERRRLLAKVEAKGVPFEKWAHLRMDFGPLEELERRQAARKAEDEKNAEEFNALYHRNPRTKREDRDAVKEGSRKKAKKSGANGHRNGASSKDSSGTMIEDDVYDATTPENDKEQETAIKQEDEDDSMADPSPVD

SEQ ID NO: 39612 - DNA, 2905 bp, Muscodor strobelii
  misc_feature: SGI EST ID NO. CUFF.95702.1
  misc_feature: Variant of the nucleotide sequence at SEQ ID NO 39610
ggaacttgcacatgtgattccctcagctagacctctgcaacccgcactttcacatgcgtccatcgcgacatacttgctcaccccacttgtaccttccaacgacgatgtgaactttacagcaacttctatgcgcacaccgcgacgcgatacgccgtggcaggtggtaactggaagtcgccgtcgtcaaggtgggcaataatggacttctgggactgtcgcccgacgtcctcattcttttccctcatcttatatcgagacgcttcatcacagcactaggcatacccaaatttttggtgcacgaccttataaatactctcaaatattctcccatcagtttctatagtcaatcatcgaacgctatgacctcaccagcaacctccgagggccaaggcacaccagccgccgacaaagatggcgataatgtcgagaaaccccgtcttaccgaggaggagaaaaaaaagaatcacatcgactcagaaaagaagcgacgagaggctatccgtgctggttttgatcaactgtgcaaagtcgtcccaggtctcgagggccacgcaagatctgagggccacgtcctgcagaagactgtcgagtacgctatggagcagatgcgcgagcgaagacgactcctcgccaaggtcgaggcgaagggcgttccttttgagaaatgggctcacctccgaatggacttcggaccactcgaggagctagaacgtcgccaggccgcacgtaaggccgaagacgagaaaaatgccgaggaattcaacgcactgtaccacagaaacccgaggaccaaaagggaagacagagacgctgtgaaggaaggctctcggaagaaagccaagaagtctggtgctaatggccatcggaacggtgcctcaagtaaggacagcagtggcactatgatcgaagatgatgtttatgacgcgactacacccgaaaatgacaaagaacaggagactgcgattaagcaggaggatgaagatgacagtatggctgatcccagtcctgtcgattgaccgagctgagatattttgcatggcagaccactagttgcaattgccgctacatccattggcgtgatggacttgagggcggaagagaaaatgattatctcaattattcgagatgttggtatcaaaatcgcggagtctggctcggcagtatagttaacagtctaggtagaccaacagttagtctactcgttattcgaaaatgaaagaaactatcaattcgaattatatcagagaattacccagttccgtgtgaatcgtatggtttttggtagaaaagacgtggatagtgcccattattgttacatttattacaagctatctacaatctattcatacaacgccactttctccatgaggaccttcttcaacgtcaagggatcataaaccttgtactgagagcccacccccaagcccgaggcgtctatgtgcagggtgccgttctcagcttctttggggccaaccacaaccatgactccgtagcccttggccctcgcatcgacaagctttctgggaaaggagcggccggtgtcgtcgatatcgacggtcaagcccgtagggttccaaggatcgcaagtctggttcctgcttgagggacgacctaacaggatgtcccgcgcccgctttgcgtgctgaagaacatgttccttcgaactgatggtcatgatcacgacttgtttgggattaagccagaatggccacttgccgtcgtagtgctcgatgagaagggccatcaaccgctcgactgagcccaagacggcacggtgtatcataacgggtcggaccagatctgttttcaggagttcctctggatctgtggtcgtctcgccgcgtcgctcgtattcgggggcaggtgctacgtagccgaggtcgaagcgcttggggagttggaagtcgagctggatcgtggctgtctggtgctcttttccgtccgagtcacgtagtacaatgtcgatcttggggccgtagaaggcgccgtctccctcgttgactgtccattcttgtcctgatgcatctagtgcccttctcagtgctgactcggcggcttcccattcttcgggttctcctatgaagtgatctgccggtcgtgtggatagcgcgaggcggtaggtgcctagttgcagggtggagtagacgaagcggacgaagtctaaggtctgtttgatttcctcctcgacttgtgacggtcggcagaagatgtggccgtcgtcctgatggaatcgtctcactctcgtcaggccgctcagggcgccggagatctcgtttcggtgcagcggggagaagtcggcgtagcggatggggagatctttgtagctgcgcctcttggacgcgaatatcaggcagtggccggggcagttcatgggcttcaagccgtattcgtcttcttcgcccgtctcggccgcgtcgctgcgtgatggcgacgtgctcgtcactgtgaacatgtcatcgccgtagttgtcgagatggcctgattgcttccagagcgccttcttgtagatggtgggcgtgatgacctcgtcgaacccatatctgagatattgtttccggaggaactcgactaggcggttgaatatcctagcgccattgggtaggaggattggcgagcctgggctgtagatggaggttgtgaatagttcctgcttcacgccaagctctctgtggtctgctgggggctttggtggaagtccggctgttgcagtcgcttcttgcttgggagcatcgcaggatgcgcaatgcctctgccagctcttctgaaatgggcgttcaaggcatcgaattctgttcaatggaatttggcttcggaattggtggcgaatggccactgcccttctggagagcatgccgctggattatcgtacatgagacatgagatgacatggcgatcaacaacattt

SEQ ID NO: 39613 - DNA, 1392 bp, Muscodor strobelii
  misc_feature: SGI cDNA ID NO. 573787
  misc_feature: Encodes the peptide sequence at SEQ ID NO 39614
atgaagacgcgtgtagtcgcgagattgaaatctcgaacggcatgcgacagatgctatgagcttaaagaacgatgtcaacgtgcatcggtgtctgctcattgtgcacgatgtgacagactgggcttgacttgctcaacgatacggccggtgaagcccgtcggtcggagggcccatcgtgcggcgtcgaccaattgtacaaagacgcctcaatacgcctcaggcattgaattatgtttgaatgcgctccctagcttgaagctagaagagaaggagctgctggtgtctctcctgggcgaaaccgaaaacctcaatcaatatgttgcatctcaatgttttctcgctgggcagcgggagacattctctacccacatacaagccgcttttccattgcttagagatgctctccttgcatgcgctttgtcaatgcgacatctccgaaccggtaccatgacagatgtagacacaacttcgagtattcagtacgtaacgaaagctttgaacacgctacgctcaatgcccgtcacatcttctcaagacgcaactctatgtcatgctctgggtggcctgctagcgttctctatatcttcgaccattggtgtagggattcccgatatctgtcgtcattgcttaagcacaacaactccggtactgaagaacaccgagtccgacgaacaggaggattcatggagaaccttcctcgttcttttagacactatggactgtctcatctatcgacaaaagccgatactgatgcttgaagcaccatcatctactatcgttgattgtcgcttgggcctatgcttgcctctattaccatactatcaggatatcggttacatcagcaattcgcttcttaatgccactgatgtcacggctcggagtcgcctgcaaaagcaactagatgatattcgttacatagttgagccctggttgccgtcttatctcgatcaacttgccgaccgatacaacgcagcagacattgtctatctactagctcaagccaaggtgtatcgcttgggagcgctcctacttggccaccgactacgattccaatttggtcatgaagatacgcaggcagaaatctggtcaaatgaaatcatgatggaacttagaatggcaaaacgagtcacgaagcgaacaatgaagttcgtgacactgccattcatcgttgccgcagtcgaggctcgaggtcaaatcaagcgcgccgagacacttgaccttgtggatgattgcgtcgatcatttcgcgcagttcttgcgaaagcagacaaagacatttctcacgaggatttggcatgaacgagatttgagcctgacaagttgttggttcgattcagtctacaagccttgtccagtgctggattctatcaatgcaagtcatgttgcttgttga

SEQ ID NO: 39614 - protein, 463 aa, Muscodor strobelii
  misc_feature: SGI Peptide ID NO. 573787
  misc_feature (1)..(459): NCBI GI: 154290953 Blast Desc: BC1G_15540 [Botryotinia fuckeliana B05.10] gi|150847176|gb|EDN22369.1| BC1G_15540 [Botryotinia fuckeliana B05.10]
  misc_feature (10)..(462): NCBI GI: 212535798 Blast Desc: conserved [Penicillium marneffei ATCC 18224] gi|210070454|gb|EEA24544.1| conserved [Penicillium marneffei ATCC 18224]
  misc_feature (10)..(451): NCBI GI: 242811654 Blast Desc: conserved [Talaromyces stipitatus ATCC 10500] gi|218714133|gb|EED13556.1| conserved [Talaromyces stipitatus ATCC 10500]
  misc_feature (60)..(356): NCBI GI: 156033189 Blast Desc: SS1G_13670 [Sclerotinia sclerotiorum 1980] gi|154699073|gb|EDN98811.1| SS1G_13670 [Sclerotinia sclerotiorum 1980]
  misc_feature (8)..(446): NCBI GI: 189190646 Blast Desc: [Pyrenophora tritici-repentis Pt-1C-BFP] gi|187973268|gb|EDU40767.1| [Pyrenophora tritici-repentis Pt-1C-BFP]
  misc_feature (12)..(446): NCBI GI: 67536912 Blast Desc: AN4626.2 [Aspergillus nidulans FGSC A4] gi|40741238|gb|EAA60428.1| AN4626.2 [Aspergillus nidulans FGSC A4] gi|259482539|tpe|CBF77118.1| TPA: Zn(II)2Cys6 transcription
  misc_feature (1)..(444): NCBI GI: 255940816 Blast Desc: Pc16g08580 [Penicillium chrysogenum Wisconsin 54-1255] gi|211585800|emb|CAP93528.1| Pc16g08580 [Penicillium chrysogenum Wisconsin 54-1255]
  misc_feature (9)..(444): NCBI GI: 256725399 Blast Desc: NECHADRAFT_82975 [Nectria haematococca mpVI 77-13-4]
  misc_feature (106)..(397): NCBI GI: 255933179 Blast Desc: Pc12g12460 [Penicillium chrysogenum Wisconsin 54-1255] gi|211582679|emb|CAP80873.1| Pc12g12460 [Penicillium chrysogenum Wisconsin 54-1255]
  misc_feature (12)..(425): NCBI GI: 169779637 Blast Desc: [Aspergillus oryzae RIB40] gi|83773022|dbj|BAE63150.1| protein product [Aspergillus oryzae]
MKTRVVARLKSRTACDRCYELKERCQRASVSAHCARCDRLGLTCSTIRPVKPVGRRAHRAASTNCTKTPQYASGIELCLNALPSLKLEEKELLVSLLGETENLNQYVASQCFLAGQRETFSTHIQAAFPLLRDALLACALSMRHLRTGTMTDVDTTSSIQYVTKALNTLRSMPVTSSQDATLCHALGGLLAFSISSTIGVGIPDICRHCLSTTTPVLKNTESDEQEDSWRTFLVLLDTMDCLIYRQKPILMLEAPSSTIVDCRLGLCLPLLPYYQDIGYISNSLLNATDVTARSRLQKQLDDIRYIVEPWLPSYLDQLADRYNAADIVYLLAQAKVYRLGALLLGHRLRFQFGHEDTQAEIWSNEIMMELRMAKRVTKRTMKFVTLPFIVAAVEARGQIKRAETLDLVDDCVDHFAQFLRKQTKTFLTRIWHERDLSLTSCWFDSVYKPCPVLDSINASHVAC

SEQ ID NO: 39615 - DNA, 3373 bp, Muscodor strobelii
  misc_feature: SGI EST ID NO. CUFF.95424.1
  misc_feature: Variant of the nucleotide sequence at SEQ ID NO 39613
tgaagacgcgtgtagtcgcgagattgaaatctcgaacggcatgcgacagatgctatgagcttaaagaacgatgtcaacgtgcatcggtgtctgctcattgtgcacgatgtgacagactgggcttgacttgctcaacgatacggccggtgaagcccgtcggtcggagggcccatcgtgcggcgtcgaccaattgtacaaagacgcctcaatacgcctcaggcattgaattatgtttgaatgcgctccctagcttgaagctagaagagaaggagctgctggtgtctctcctgggcgaaaccgaaaacctcaatcaatatgttgcatctcaatgttttctcgctgggcagcgggagacattctctacccacatacaagccgcttttccattgcttagagatgctctccttgcatgcgctttgtcaatgcgacatctccgaaccggtaccatgacagatgtagacacaacttcgagtattcagtacgtaacgaaagctttgaacacgctacgctcaatgcccgtcacatcttctcaagacgcaactctatgtcatgctctgggtggcctgctagcgttctctatatcttcgaccattggtgtagggattcccgatatctgtcgtcattgcttaagcacaacaactccggtactgaagaacaccgagtccgacgaacaggaggattcatggagaaccttcctcgttcttttagacactatggactgtctcatctatcgacaaaagccgatactgatgcttgaagcaccatcatctactatcgttgattgtcgcttgggcctatgcttgcctctattaccatactatcaggatatcggttacatcagcaattcgcttcttaatgccactgatgtcacggctcggagtcgcctgcaaaagcaactagatgatattcgttacatagttgagccctggttgccgtcttatctcgatcaacttgccgaccgatacaacgcagcagacattgtctatctactagctcaagccaaggtgtatcgcttgggagcgctcctacttggccaccgactacgattccaatttggtcatgaagatacgcaggcagaaatctggtcaaatgaaatcatgatggaacttagaatggcaaaacgagtcacgaagcgaacaatgaagttcgtgacactgccattcatcgttgccgcagtcgaggctcgaggtcaaatcaagcgcgccgagacacttgaccttgtggatgattgcgtcgatcatttcgcgcagttcttgcgaaagcagacaaagacatttctcacgaggatttggcatgaacgagatttgagcctgacaagttgttggttcgattcagtctacaagccttgtccagtgctggattctatcaatgcaagtcatgttgcttgttgaaataatttggcaactgttctagtatgtgtttgacctcatggttaggatttttgatgattgattcgatctgagccgctgcgttcaatagagcttcgtccttctgcctgtgtcctacgacctggacgcaaactggcatgcctttgtattgctccgggccagtatctatgcagcgatgttagcctacaaagcattgagtagcttgaaaactagcaatacttacacaagtcatagacttgctcatcgaccgggccaaacttggcgttgctcaaaccgtcagcaacatccaagtcctgtacttcacccacaggtagtacaatcgcgggacgatcaagatagttccagagacacgtatataccggtctgttccatctgtctaatggcacggctgtgtgcggggctggtggcatcaaaatcacgtccaagccattaccacaaaataggttgcgatacgtttccatggcctgcgctcgacgatagttcaggtcgaagtaaccatccagagttgtccctggtacagacagaaggccgcatgcttccagagagggggataggcgattctccagtacgggcgaactgttcgcgataatactactcggtgtcagtgtacacactatagttcgtattcgtagtgcaactcacatcgcctccgtcaagtgccatatattgtagaaagtcatgatagtacgccatgacattaggcaagtcgataggcacaatctcaacgtcatcgttcttgctgagaagatcgacagcccgcttcaatgcacatcgaactggtggcgacggagtgaaaacgccatcgtcctgcgcgacaccaattcgtaatttacgtatgggctggagatcaagccatggaatagagacgacgctgctatcataccgccagggctccgcttggagtacggccttgagcaagagagcgcagtctcgaagggaggtcgccagtggtccaactgttgaacgaacaccgtcggttcctgggtgaagcaggtgtctgacaccgccatgggggatcaatcctacgcttggcctaaatccatagagaccattgcagaccgatggaacacgaatgcttccgccaatatcagtaccaattccaagaatgctaccacgaagagcgattagagcgccttcacccccagtacttccaccagctgtgaacagcttatttcgaggattcaatgttcggccaaagacattgttgtgactatcgcctgtcatgatggtctgtggcaagttggttttgcagtagagcactgcacccaagtccttcagcatagcggcgagcgcactatcttcctttgcaggctcatcgacatagcatgccaacccagtcgatgtatcatagccagtgacttgaaagctgtctttcaaagatattggcagtccgaagagaggagggagagacttagttcgaggcttggtatcgtattctcgatcgagttgcttcgctcgcttgatagcgtcgtcgaaaaatatctctgtcaggcaattcgtctgccataaactcggcattagcggcttactttcaaagacagttaatagaccgaccaattgatgagcaatggcagcccttttacagaatgctacagtcacttgctcaatggtccagacccgggacctcaacttctcgaggagtgctgtcgcatcgtactttgaggtgatttcgacttcgatctcatcaagaagcccgcattttaggggtacgtccataacattgagtgtattttcatatgtcgttgtaagaatgcgccaagatttgggtatcttgtccagttgctgagctttcttcctcgcggagatcgcttcgtataatttcggtgtggacatgttgtatagcaaaaatcactcaaatgggaactgagatgcgaaacaacttaatgttatcttgtctattcggagtattagacttgctacgcgttgtatcgtttatatacctttgcttaaattcaacacagttagatgagtagatcccgtcgaac

SEQ ID NO: 39616 - DNA, 798 bp, Muscodor strobelii
  misc_feature: SGI cDNA ID NO. 573788
  misc_feature: Encodes the peptide sequence at SEQ ID NO 39617
atgacggacatctacaacagcgaattccacaattcagacttcactatcacatcgccatcccgccagggctcgccgtacgcatcggccgtcaacgagttccccaagagcacaagccaggtacgtatggagtcagcacagcaacagcgcgagaagagggaagccgagcaggatgtcagggtgctgcaacaacagccaacccggcacaagctacagcagcaagaaacacccagtaccaactcgccgaaggacgccgtgtcagagttcaacgacttcgacagtgattcgaactttcctctgtttctgcctcaagtgaagggcaacctctgcatgaggaacagtaatgtgactggaaacatgaacatggtggaggctgcatcgcggcagccaacgccttcgcttctgtctacgatggcaacgccaccaccgcagaccgcattcgacttcttcattccgtcaaatatacagattccacaaccgtatccattcgtcgggagacaaacgacactgcagcagcagtcggcatcgtcagtgtcctcattctcacatataagctccacagaaacaacgacggcgagttcgggcaatagcgatgaaccggttcagcggccaacaagaacattgacaggcgggggcggcattaccgtgtatgccatcccgacgtggaactacctggcaggcatcacagacggcttatcgggcgaaacgaagcgacaaaatgaggacagccgcctgcttatgggctgcaacgttgtgtacggtctacagcctgccggtgtggctggcatcgggcagcgatga

SEQ ID NO: 39617 - protein, 265 aa, Muscodor strobelii
  misc_feature: SGI Peptide ID NO. 573788
  misc_feature (1)..(215): NCBI GI: 171690196 Blast Desc: protein product [Podospora anserina] gi|170945046|emb|CAP71157.1| protein product [Podospora anserina]
  misc_feature (17)..(215): NCBI GI: 85077320 Blast Desc: NCU01640 [Neurospora crassa OR74A] gi|18307454|emb|CAD21514.1| related to 26S proteasome subunit RPN4 [Neurospora crassa] gi|28917048|gb|EAA26772.1| [Neurospora
  misc_feature (18)..(185): NCBI GI: 58257413 Blast Desc: 26S proteasome regulatory subunit-like protein [Magnaporthe grisea]
  misc_feature (18)..(185): NCBI GI: 39973453 Blast Desc: conserved [Magnaporthe grisea 70-15] gi|145017902|gb|EDK02181.1| conserved [Magnaporthe grisea 70-15]
  misc_feature (18)..(215): NCBI GI: 256729402 Blast Desc: NECHADRAFT_71246 [Nectria haematococca mpVI 77-13-4]
  misc_feature (18)..(215): NCBI GI: 46116892 Blast Desc: FG04288.1 [Gibberella zeae PH-1]
  misc_feature (18)..(215): NCBI GI: 156034492 Blast Desc: SS1G_13549 [Sclerotinia sclerotiorum 1980] gi|154698952|gb|EDN98690.1| SS1G_13549 [Sclerotinia sclerotiorum 1980]
MTDIYNSEFHNSDFTITSPSRQGSPYASAVNEFPKSTSQVRMESAQQQREKREAEQDVRVLQQQPTRHKLQQQETPSTNSPKDAVSEFNDFDSDSNFPLFLPQVKGNLCMRNSNVTGNMNMVEAASRQPTPSLLSTMATPPPQTAFDFFIPSNIQIPQPYPFVGRQTTLQQQSASSVSSFSHISSTETTTASSGNSDEPVQRPTRTLTGGGGITVYAIPTWNYLAGITDGLSGETKRQNEDSRLLMGCNVVYGLQPAGVAGIGQR

SEQ ID NO: 39618 - DNA, 708 bp, Muscodor strobelii
  misc_feature: SGI cDNA ID NO. 573790
  misc_feature: Encodes the peptide sequence at SEQ ID NO 39619
atgcagcacaagcgggtgaataaagcatgtgaaggatgcagacagagaaagacaaggtgcaatttagagcgtccctgcaagagatgcaaaagcaacggactggtttgtgtcactggaaccagaaaaaaagggaccaaaggatacgctgaaatactcggaaacaaccatcttgcactgatagctaccgtacataaactctatggcatggttagaaatgggcattcatgggatctgggagagccggaactcgatgacagagatcaaccagttatacatgatatcgcaacgaagttggggtgcttccgccccgatagagccggttcggcagagccggcagtggaattggaagtacagcaaacggatggcaagacagagacgttgatgccagagtcgatttactgcgacgcagaggtaaatgtcacggacatggagcaacccaaatcgttcgaattcgatgaattcgataattccggcataaaacacgactatagcgatatgtccatgcatatgcaacagaataggccggcattgtggccccaaggctttgactccgggtccatacttgcagtcgatgtcacctgcgcgaattcatctgccatggaatcatatgatctgtcaacgtcttatccggtatggcagatgacaggtgaggaaatccctattgattcacatacggcctcattcagccacacaggcgcgttcgggtaa

SEQ ID NO: 39619 - protein, 235 aa, Muscodor strobelii
  misc_feature: SGI Peptide ID NO. 573790
  misc_feature (8)..(46): Pfam Id: PF00172 Pfam Desc: Fungal Zn(2)-Cys(6) binuclear cluster domain
  misc_feature (2)..(119): NCBI GI: 85112195 Blast Desc: NCU02142 [Neurospora crassa OR74A] gi|28926076|gb|EAA35064.1| conserved [Neurospora crassa OR74A]
  misc_feature (2)..(119): NCBI GI: 171684525 Blast Desc: protein product [Podospora anserina] gi|170942223|emb|CAP67875.1| protein product [Podospora anserina]
  misc_feature (2)..(104): NCBI GI: 116193355 Blast Desc: CHGG_06395 [Chaetomium globosum CBS 148.51] gi|88182308|gb|EAQ89776.1| CHGG_06395 [Chaetomium globosum CBS 148.51]
  misc_feature (4)..(119): NCBI GI: 39943262 Blast Desc: MGG_03711 [Magnaporthe grisea 70-15] gi|145009692|gb|EDJ94348.1| MGG_03711 [Magnaporthe grisea 70-15]
  misc_feature (12)..(215): NCBI GI: 256733983 Blast Desc: NECHADRAFT_36008 [Nectria haematococca mpVI 77-13-4]
  misc_feature (12)..(219): NCBI GI: 46128249 Blast Desc: FG08502.1 [Gibberella zeae PH-1]
  misc_feature (2)..(102): NCBI GI: 154319654 Blast Desc: BC1G_02308 [Botryotinia fuckeliana B05.10] gi|150855966|gb|EDN31158.1| BC1G_02308 [Botryotinia fuckeliana B05.10]
  misc_feature (2)..(119): NCBI GI: 240104951 Blast Desc: Fungal Zn binuclear cluster domain containing protein [Coccidioides posadasii C735 delta SOWgp]
  misc_feature (2)..(102): NCBI GI: 119195373 Blast Desc: CIMG_02061 [Coccidioides immitis RS]
  misc_feature (2)..(102): NCBI GI: 156061301 Blast Desc: SS1G_02793 [Sclerotinia sclerotiorum 1980] gi|154700197|gb|EDN99935.1| SS1G_02793 [Sclerotinia sclerotiorum 1980]
MQHKRVNKACEGCRQRKTRCNLERPCKRCKSNGLVCVTGTRKKGTKGYAEILGNNHLALIATVHKLYGMVRNGHSWDLGEPELDDRDQPVIHDIATKLGCFRPDRAGSAEPAVELEVQQTDGKTETLMPESIYCDAEVNVTDMEQPKSFEFDEFDNSGIKHDYSDMSMHMQQNRPALWPQGFDSGSILAVDVTCANSSAMESYDLSTSYPVWQMTGEEIPIDSHTASFSHTGAFG

SEQ ID NO: 39620 - DNA, 1428 bp, Muscodor strobelii
  misc_feature: SGI EST ID NO. CUFF.95462.0
  misc_feature: Variant of the nucleotide sequence at SEQ ID NO 39618
gcctacaggctatgttgtatataaatactctcattgaatcccaacttcaaatagttataaatcaatccagtttagaattccaattctgcacctagacccaacagctctcgaggcagcggctcgagactaccttatgctgacgtcacatcatccagtcgaatgcatgttgagattatttgactagctacaccaataaacaaacaacgtatggcaagatcttgcgacgaaagtataattagacttactttaatcatatccccactgtgtactgtagcagtggatcaacatggattattgataaggtagtcatggggtcgcctttgggctacatcaaagaaattctttcttcgtttgcatatatccagtaacagaccctcactaaaagctgtgcagactttgccgttttctcaacaacattcacttctctgccatatgctagtcaatttcccaacatggagattggcatgccagtgttatcaaccatagaagtgaagttggaaacatcagcgaccacatcaattacaaaggttatcaagccagtatgccgtcgagcaacacgacttgcaactcattctcgagtccatgaacgcgggctatcatcaccacatagtgccgagatgcagcacaagcgggtgaataaagcatgtgaaggatgcagacagagaaagacaaggtgcaatttagagcgtccctgcaagagatgcaaaagcaacggactggtttgtgtcactggaaccagaaaaaaagggaccaaaggatacgctgaaatactcggaaacaaccatcttgcactgatagctaccgtacataaactctatggcatggttagaaatgggcattcatgggatctgggagagccggaactcgatgacagagatcaaccagttatacatgatatcgcaacgaagttggggtgcttccgccccgatagagccggttcggcagagccggcagtggaattggaagtacagcaaacggatggcaagacagagacgttgatgccagagtcgatttactgcgacgcagaggtaaatgtcacggacatggagcaacccaaatcgttcgaattcgatgaattcgataattccggcataaaacacgactatagcgatatgtccatgcatatgcaacagaataggccggcattgtggccccaaggctttgactccgggtccatacttgcagtcgatgtcacctgcgcgaattcatctgccatggaatcatatgatctgtcaacgtcttatccggtatggcagatgacaggtgaggaaatccctattgattcacatacggcctcattcagccacacaggcgcgttcgggtaaccgctcgatgcatggtctgattttttccctgctgtctagcataagatatcagaaggaatcaccgatgcaaatttagtcatctagataaaccgaagtatgcaaa

SEQ ID NO: 39621 - DNA, 609 bp, Muscodor strobelii
  misc_feature: SGI cDNA ID NO. 573791
  misc_feature: Elevated expression when VOC is produced
  misc_feature: Encodes the peptide sequence at SEQ ID NO 39622
atgtctaccactgacaatgcccggtacgacagcatggtcaactcgtttgatgaagctgagcagcgtacaacagagcttaccgttacccaaatcgcagctctccaaatacggtcggaggagcaagtaggtcctgaaaatattgacacggatgattacacttcgactccggagagtacttgcctcgccgccgataaatatgccgcttgggctaatgaggtttttggcttcaatggctggtcatcgagtattcagggcgtccacactaactttcttaacaagaacggtcagatctccgaggtctccctagacatatccgttactattcgcgtcactttaagagacggcacctaccgcgaagatacggggtacagtcatgttagagattacaaagggaaagccgccgcattcgaaacaggaaagaaagaggcaacaaataacgcattaaaacaaacgttaaaaagcttaaacgacttacgaaaaattcgtatcgccagcgaggtctctttacctgagttctccaatattaatggggatacttttcccgtaccgagtcggatgtctccgtcgggcgacgacgagacaactacaaggatgcaggccgctgagtga

SEQ ID NO: 39622 - protein, 202 aa, Muscodor strobelii
  misc_feature: SGI Peptide ID NO. 573791
  misc_feature (29)..(174): Pfam Id: PF04098 Pfam Desc: Rad52/22 family double-strand break repair protein
  misc_feature (70)..(152): Pfam Id: PF04098 Pfam Desc: Rad52/22 family double-strand break repair protein
  misc_feature (8)..(158): NCBI GI: 52783233 Blast Desc: RAD52_MAGGR RecName: Full=DNA repair and recombination protein rhm52; AltName: Full=RAD52 homolog gi|22775418|dbj|BAC11860.1| recombinational repair protein
  misc_feature (8)..(158): NCBI GI: 145604450 Blast Desc: MGG_08585 [Magnaporthe grisea 70-15] gi|145012445|gb|EDJ97101.1| MGG_08585 [Magnaporthe grisea 70-15]
  misc_feature (14)..(158): NCBI GI: 226281725 Blast Desc: RAD52 DNA repair protein RADC [Paracoccidioides brasiliensis Pb01]
  misc_feature (14)..(158): NCBI GI: 226287833 Blast Desc: RAD52 DNA repair protein RADC [Paracoccidioides brasiliensis Pb18]
  misc_feature (14)..(158): NCBI GI: 225680194 Blast Desc: RAD52 DNA repair protein RADC [Paracoccidioides brasiliensis Pb03]
  misc_feature (8)..(158): NCBI GI: 256732158 Blast Desc: NECHADRAFT_100571 [Nectria haematococca mpVI 77-13-4]
  misc_feature (14)..(158): NCBI GI: 240280058 Blast Desc: RAD52 DNA repair protein RADC [Ajellomyces capsulatus H143]
  misc_feature (1)..(158): NCBI GI: 261352115 Blast Desc: DNA repair and recombination protein rad22 [Verticillium albo-atrum VaMs.102]
  misc_feature (14)..(158): NCBI GI: 261192601 Blast Desc: RAD52 DNA repair protein RADC [Ajellomyces dermatitidis SLH14081] gi|239589189|gb|EEQ71832.1| RAD52 DNA repair protein RADC [Ajellomyces dermatitidis SLH14081]
  misc_feature (13)..(158): NCBI GI: 212528506 Blast Desc: RAD52 DNA repair protein RADC [Penicillium marneffei ATCC 18224] gi|210073808|gb|EEA27895.1| RAD52 DNA repair protein RADC [Penicillium marneffei ATCC 18224]
  misc_feature: Useful for introducing or modulating the production of volatile compounds
MSTTDNARYDSMVNSFDEAEQRTTELTVTQIAALQIRSEEQVGPENIDTDDYTSTPESTCLAADKYAAWANEVFGFNGWSSSIQGVHTNFLNKNGQISEVSLDISVTIRVTLRDGTYREDTGYSHVRDYKGKAAAFETGKKEATNNALKQTLKSLNDLRKIRIASEVSLPEFSNINGDTFPVPSRMSPSGDDETTTRMQAAE

SEQ ID NO: 39623 - DNA, 1842 bp, Muscodor strobelii
  misc_feature: SGI EST ID NO. CUFF.95567.2
  misc_feature: Variant of the nucleotide sequence at SEQ ID NO 39621
ctgccccaacccgctgtctctttgtcgatactgcaagccagtgacaacacagagcatagcgcatcctgttgggattcggcggcgaggaggacttcggcaagacaggcaggagatatgggcatgtcgggcagcggtcttggctaggtgagcacgttggcacagggtgtcttcggcggagagggcgttgtcgtcatctacccatcgttggacgcgtgcttcagtgatcgggggggagccaaaggcctgcaggggtggtggctacatgcacgggctcggcgagaatgctctcccagagcttgttgaggtcgtggcatggcacccgggcgcgtgcggctttgtctcgagggacatggcccccgccgcagcgtccacacttggcgacgatgctgatgtaaacggcggcggaacgccagtctggagtatcagggctatggtctgtcgtggctggaggagaggatagaccaaggatgcgctttagcggaaggtgggttggggtgttcacggtgtgggtggggttcctaggtaggagcggtcgacgtcaatcaagtagttagactaatacacgtgacattccttatttccgacagttaacttcgccaacccgcgaacctaagtagcgactattaaagcagtctgctataaaaagaaccattttagacgcacgtcaaggttgtctatcaacatcaactcaacggtgctcatttcgcctacttcttattagcttgttagctattcaaaactacctagaacgatcggcgctgcgagttcgaacacccagccgcccgtcggaaagttgttaggtgcttccagtgctcgatcacgcaaggatttcagcatgtctaccactgacaatgcccggtacgacagcatggtcaactcgtttgatgaagctgagcagcgtacaacagagcttaccgttacccaaatcgcagctctccaaatacggtcggaggagcaagtaggtcctgaaaatattgacacggatgattacacttcgactccggagagtacttgcctcgccgccgataaatatgccgcttgggctaatgaggtttttggcttcaatggctggtcatcgagtattcagggcgtccacactaactttcttaacaagaacggtcagatctccgaggtctccctagacatatccgttactattcgcgtcactttaagagacggcacctaccgcgaagatacggggtacagtcatgttagagattacaaagggaaagccgccgcattcgaaacaggaaagaaagaggcaacaaataacgcattaaaacaaacgttaaaaagcttaaacgacttacgaaaaattcgtatcgccagcgaggtctctttacctgagttctccaatattaatggggatacttttcccgtaccgagtcggatgtctccgtcgggcgacgacgagacaactacaaggatgcaggccgctgagtgaccttataagtggtcaattgtggctgagctggctgatacagatagcagtcgcttaatcaggaaaaggactaaaatccaaatttctagtaatccaaaggagtatgaactcccgttactgtaacctaggcgtggacatgaaggcgtatatcactaagctttgactcgggggcagtggtacctttcgttgccttttacctttcatttcgatagaagaagagtcgcagcactccgtagcgatatactagacgctgtcaaccccgaggtttgtatgggcatatgcgatctatcgcagagtctggagtggaacgcggacggcggcactatggtcccgcctttgcatttggtggtacctctatcatatactaccgcatctttaagagcagaattgaacgatgagag

SEQ ID NO: 39624 - DNA, 1923 bp, Muscodor strobelii
  misc_feature: SGI cDNA ID NO. 573792
  misc_feature: Encodes the peptide sequence at SEQ ID NO 39625
atggaaaccgtaacaagccaaagcggaggcaaaagggacaataagaacatcgagactattgaaggggcagctaatcatggtataagtaccactcaatataatactagagtggaatcattgcagttaagacatatcggcgtaaagatatatgaaacttttgccaacgcaaacgaagccgataaagatgcgcatgcctcaaccattaggcgcctgcagatccaaaaggagaaattccagctttgggctcgcagcctaggattgtttcagcaaggtcacacatccctagactatcgcgttcgagatgcatttgcagtcaaagagccgttgttttctgctctgcaaatgttgcacgagaatctcgaacaagtgacatcaattgcctcaggacggcgatcgccgtttgaagaacagaaacgcacgaacgccgaacgcggcgaaggcggaaagcagcatgatagaaataaggacacagacgatgaagaatctcgaagccacagcgatggcgatgattcaagcgattcggaatcggaatcggacagtggagaatctatgggcgaggtcgattatcgactacggctgatagacgaggcaatcgactctctttatatcctagccacgaaaatacgcagtcctaagaatcgaccccagaggacattagatcagatttataggcatgtccccgttcacgaccgagtagcacatattcgggagcgggagcacctcgaaacgatgattgtgtctcacgtgcaacgtcagcaaatcctcgaactcctgaacgactcgcctgatcaaaacgcacaagatatgttatcccagtactgctcaggagataattggttaatccgccgcgctggtgtcgcaaacgcccgacgacgacaacaatttgtgtattggaaacaacatgcccaacggctgggagatgtggcggcggagccgccgcctataccagtggacaaaaagcaacagatcaagaatctatcttttatcactacagatctccttgagaatgaaacgctaagcgcaactctgcctgcaagtttggtaccacggcagtcgatggcgacatccgctacccaattaccacctgctctcctcatacctagagacaccatttccgtcatttcgcatcagagtcgcgtgtcgactttgcttagtcccaggggagacacagttgcgtggccgcttccccctgatatcacaggacagaccaacttcttttgttgtccgtattgtttcgtgatatgtcctaagacttatcttcgaacggattcttggcgccgtatcactgcacatatgaaatttgcgaagatccgaaccgtctgtacggttcaaggcaggaatggatcgatcatgaaagccaacgatattcgtgtctggcactgtcagcggcacgcgcaagaattcgaaacccagcaagagtacacagaacatttgaagatcgatcacgaagatacaagggatgaagacttcgcgccagagcttatatccgccgtggtaggaccgtcgacagcgcttcacagaggctgtccattctgccctgcgtcccttgaaacgtcgatcgagatgcacaagcatgtggctttccatctggagcgcctagctattttggcgttaccacgcgaaggaaacgaccaagaaagtgatgaagacagtcacgcatcttctgaaagccacgaagctcagcagagaggtcgaaggagatcaatcaatgaggacttcgaaaacaaaggggtcttcaaaattgacgaagaagcgcatcaccttgccccccagccagtattactggaagctctgacagaagtgaatctggatatccaaaaccagcccactccagtactcacaccagctttgagtgcactacgatggctagttggcattaatcttgattatgatggatccgatactttccgaaatgggacatag

SEQ ID NO: 39625 - protein, 640 aa, Muscodor strobelii
  misc_feature: SGI Peptide ID NO. 573792
  misc_feature (42)..(633): NCBI GI: 171693577 Blast Desc: protein product [Podospora anserina] gi|170946737|emb|CAP73541.1| protein product [Podospora anserina]
  misc_feature (71)..(564): NCBI GI: 169612235 Blast Desc: SNOG_09236 [Phaeosphaeria nodorum SN15] gi|160702462|gb|EAT83428.2| SNOG_09236 [Phaeosphaeria nodorum SN15]
  misc_feature (70)..(554): NCBI GI: 119177050 Blast Desc: CIMG_07520 [Coccidioides immitis RS]
  misc_feature (70)..(554): NCBI GI: 240107783 Blast Desc: Protein kinase domain containing protein [Coccidioides posadasii C735 delta SOWgp]
  misc_feature (37)..(573): NCBI GI: 119490809 Blast Desc: protein kinase, [Neosartorya fischeri NRRL 181] gi|119411261|gb|EAW21204.1| protein kinase, [Neosartorya fischeri NRRL 181]
  misc_feature (68)..(561): NCBI GI: 67523843 Blast Desc: AN2377.2 [Aspergillus nidulans FGSC A4] gi|40745332|gb|EAA64488.1| AN2377.2 [Aspergillus nidulans FGSC A4] gi|259487781|tpe|CBF86722.1| TPA: conserved [Aspergillus FGSC
  misc_feature (139)..(291): NCBI GI: 116200864 Blast Desc: CHGG_10977 [Chaetomium globosum CBS 148.51] gi|88175691|gb|EAQ83159.1| CHGG_10977 [Chaetomium globosum CBS 148.51]
  misc_feature (334)..(540): NCBI GI: 116181308 Blast Desc: CHGG_01282 [Chaetomium globosum CBS 148.51] gi|88185579|gb|EAQ93047.1| CHGG_01282 [Chaetomium globosum CBS 148.51]
  misc_feature (23)..(611): NCBI GI: 225554971 Blast Desc: conserved [Ajellomyces capsulatus G186AR]
  misc_feature (77)..(557): NCBI GI: 255941880 Blast Desc: Pc16g14110 [Penicillium chrysogenum Wisconsin 54-1255] gi|211586332|emb|CAP94081.1| Pc16g14110 [Penicillium chrysogenum Wisconsin 54-1255]
METVTSQSGGKRDNKNIETIEGAANHGISTTQYNTRVESLQLRHIGVKIYETFANANEADKDAHASTIRRLQIQKEKFQLWARSLGLFQQGHTSLDYRVRDAFAVKEPLFSALQMLHENLEQVTSIASGRRSPFEEQKRTNAERGEGGKQHDRNKDTDDEESRSHSDGDDSSDSESESDSGESMGEVDYRLRLIDEAIDSLYILATKIRSPKNRPQRTLDQIYRHVPVHDRVAHIREREHLETMIVSHVQRQQILELLNDSPDQNAQDMLSQYCSGDNWLIRRAGVANARRRQQFVYWKQHAQRLGDVAAEPPPIPVDKKQQIKNLSFITTDLLENETLSATLPASLVPRQSMATSATQLPPALLIPRDTISVISHQSRVSTLLSPRGDTVAWPLPPDITGQTNFFCCPYCFVICPKTYLRTDSWRRITAHMKFAKIRTVCTVQGRNGSIMKANDIRVWHCQRHAQEFETQQEYTEHLKIDHEDTRDEDFAPELISAVVGPSTALHRGCPFCPASLETSIEMHKHVAFHLERLAILALPREGNDQESDEDSHASSESHEAQQRGRRRSINEDFENKGVFKIDEEAHHLAPQPVLLEALTEVNLDIQNQPTPVLTPALSALRWLVGINLDYDGSDTFRNGT

SEQ ID NO: 39626 - DNA, 1680 bp, Muscodor strobelii
  misc_feature: SGI cDNA ID NO. 573793
  misc_feature: Encodes the peptide sequence at SEQ ID NO 39627
atgtcaggcttcgagattgccggtgtagttcttggcgccatccccttggttatatcagccctcgaacattacaaagctggtaaaggcccagctgcaactttcttcagatggagagatcaattagacacgcttattttcaggcttaaactgcaaaagtctcttctacatcttgacctactcgaccttctccgaaccgccaaagttgaagaagcattggatgaggacttgaccgaagaagagtgtcttcgagtattaagagaccctcacaatgggaaagcagtccaggactctctgggaatgatatacgatacatttcttgacgtcttgaggcgatacgaagcatgtttaatgactctcaccgagaagctcgcgcacatccagggtcctccaggtaccagcaatggcaacttggcagcactcgtaaaagcaaatgaaggcggcgccatttcattcaaaaagcgcgtaaagttcacgatcgagaaaacccgacttagagatctcgtggaagaattgagagaggatcgcctgtctcttcaagctatcatcaaagcgatgcgcacacaaaaagaccgtgctcagcgccaaccatcctacgaggctaatactctggcaaaggtgtttgagacagtcagacaaaatataatccctctgttcaaggcaatctgcacaggatgcacatgcaagtgttcaaatcaccgagtcttgatgcgactagacagccgagctaagcctgatggcgaagcccttaaatctttgaagagaaagatagctaaacagaacttgactttcgatctgatgtttgatcgcgaagggcaattttatcagacagtggtcactgcgcgacatggaaaggccgatactggcgaagatgcccggaatgagaatcaaggaaatgggaacgttagatttggcccaccaatcatgatcaccgacattaatgaggctcctaaagactttcagaagttagagactgttaccgatatatgcgaagcgatttgtcaggcccggagcaccagcagagtcctccaacttgaccttattgatcacaacttgttccacaaccatactgaatcaatacatggcacttatagagagtgtccacccttggaacacttcaatgtgtttcttcgcaaagggtatcaagactatgatctcagaatgacacctaagcaacaaacgcttcttgcccttgacgttgcttcggcggttcttcagttacgccagacatgttggctggatgccgacttcaggagtgcgggtatgcacctagtccttgacgaaaatgtcgacggaggattgaattgcccttacctatttgtcgaaaagagcgttcacaagtccaagcccctagccgacgcacctaactttacacctgaaccaaaggccacattgctcgagctagcaatcatactcctagagatatggcatcatcaacctctgagcgaatgcattggtaagctggatcttgaggatgtgaacacactcgaaaaccgaaggatcgcagcgatacgatggttagagaggacttcctcgcgtttgccactgtaccacctcgctgctatcgaagaatgcctcgcagtctgctccgggaggcttcgttattggactgacaaggaatttattcgagaatactgtgaaaacataatcaagcccctgcaggagagctgcaagtcgtggtaa

SEQ ID NO: 39627 - protein, 559 aa, Muscodor strobelii
  misc_feature: SGI Peptide ID NO. 573793
  misc_feature (290)..(559): NCBI GI: 171693579 Blast Desc: protein product [Podospora anserina] gi|170946738|emb|CAP73542.1| protein product [Podospora anserina]
  misc_feature (1)..(558): NCBI GI: 119490807 Blast Desc: NFIA_063640 [Neosartorya fischeri NRRL 181] gi|119411260|gb|EAW21203.1| conserved [Neosartorya fischeri NRRL 181]
  misc_feature (1)..(554): NCBI GI: 189190046 Blast Desc: [Pyrenophora tritici-repentis Pt-1C-BFP] gi|187972968|gb|EDU40467.1| [Pyrenophora tritici-repentis Pt-1C-BFP]
  misc_feature (1)..(557): NCBI GI: 169615082 Blast Desc: SNOG_10696 [Phaeosphaeria nodorum SN15] gi|111060970|gb|EAT82090.1| SNOG_10696 [Phaeosphaeria nodorum SN15]
  misc_feature (2)..(232): NCBI GI: 119177046 Blast Desc: CIMG_07519 [Coccidioides immitis RS]
  misc_feature (2)..(232): NCBI GI: 240107784 Blast Desc: CPC735_044070 [Coccidioides posadasii C735 delta SOWgp]
  misc_feature (1)..(412): NCBI GI: 169612237 Blast Desc: SNOG_09237 [Phaeosphaeria nodorum SN15] gi|160702463|gb|EAT83429.2| SNOG_09237 [Phaeosphaeria nodorum SN15]
  misc_feature (3)..(478): NCBI GI: 67523891 Blast Desc: AN2401.2 [Aspergillus nidulans FGSC A4] gi|40745356|gb|EAA64512.1| AN2401.2 [Aspergillus nidulans FGSC A4] gi|259487805|tpe|CBF86768.1| TPA: conserved [Aspergillus FGSC
  misc_feature (20)..(556): NCBI GI: 67523841 Blast Desc: AN2376.2 [Aspergillus nidulans FGSC A4] gi|40745331|gb|EAA64487.1| [Aspergillus nidulans FGSC A4] gi|259487780|tpe|CBF86720.1| TPA: conserved [Aspergillus nidulans
  misc_feature (1)..(347): NCBI GI: 169597841 Blast Desc: SNOG_01711 [Phaeosphaeria nodorum SN15] gi|111070240|gb|EAT91360.1| SNOG_01711 [Phaeosphaeria nodorum SN15]
MSGFEIAGVVLGAIPLVISALEHYKAGKGPAATFFRWRDQLDTLIFRLKLQKSLLHLDLLDLLRTAKVEEALDEDLTEEECLRVLRDPHNGKAVQDSLGMIYDTFLDVLRRYEACLMTLTEKLAHIQGPPGTSNGNLAALVKANEGGAISFKKRVKFTIEKTRLRDLVEELREDRLSLQAIIKAMRTQKDRAQRQPSYEANTLAKVFETVRQNIIPLFKAICTGCTCKCSNHRVLMRLDSRAKPDGEALKSLKRKIAKQNLTFDLMFDREGQFYQTVVTARHGKADTGEDARNENQGNGNVRFGPPIMITDINEAPKDFQKLETVTDICEAICQARSTSRVLQLDLIDHNLFHNHTESIHGTYRECPPLEHFNVFLRKGYQDYDLRMTPKQQTLLALDVASAVLQLRQTCWLDADFRSAGMHLVLDENVDGGLNCPYLFVEKSVHKSKPLADAPNFTPEPKATLLELAIILLEIWHHQPLSECIGKLDLEDVNTLENRRIAAIRWLERTSSRLPLYHLAAIEECLAVCSGRLRYWTDKEFIREYCENIIKPLQESCKSW

SEQ ID NO: 39628 - DNA, 268 bp, Muscodor strobelii
  misc_feature: SGI EST ID NO. CUFF.95500.0
  misc_feature: Variant of the nucleotide sequence at SEQ ID NO 39626
cgaaccgccaaagttgaagaagcattggatgaggacttgaccgaagaagagtgtcttcgagtattaagagaccctcacaatgggaaagcagtccaggactctctgggaatgatatacgatacatttcttgacgtcttgaggcgatacgaagcatgtttaatgactctcaccgagaagctcgcgcacatccagggtcctccaggtaccagcaatggcaacttggcagcactcgtaaaagcaaatgaaggcggcgccatttcattcaaaa

SEQ ID NO: 39629 - DNA, 1080 bp, Muscodor strobelii
  misc_feature: SGI cDNA ID NO. 573794
  misc_feature: Encodes the peptide sequence at SEQ ID NO 39630
atgggtgtcaacgaatggatgttagaatccatcaaggagttttttgaacgtcgcccagtccccagccaggagcaatgtgatcagaaagctcaagacctcctgaattcagcgttcattcggccggttggaatgcagggatcgctgagctacacagttaccgctcaaacaattctatcatttcgaattccagagggtagactcggtggcgacaatgagaaacttgctgcgacgatccatggtaaaatcgtcccgaaagctaccttaatggctaccctcggagacgatagcgataagagcaaattccttctggtctatgcaatgcctcttttaccaggaaaatccggcctcgagacacttgccttcggaccaaagctcgaagaagagagcatttcaaagcatatcaacttcgtcactcatctcgcgagatactttgccggaaactggcttaacccccaaaaagtggctgttgaccagctcaaaaactgtcgagaggacactgaacggagattgacaattctggagaaagatgaacgctttgcatacttgcgaaattcaattgacgaaattcgcggcccgcggggtatttcacttctgtatagcgaaaagtaccgccaggttctggcacatggcgacttgtctgaaacgaaccttctcatagaccctgatgatctgtccatcactggaatcatcgattggtcattggcttctatcaggccattcggaattgaatattcagcgttgcgccgatgctcaggtaatatgaacgctgggggttggtcagactacacatgccgcgatgttacagacggtgctttttggagcgagttctggaagatcactggtgtcaacgacccagaaactagagacgagattaagagaaacacagagacagcgtgtaaacttggtcttatcatgcgtgccgcgttcacgaagactttggatgggaagccactggacgttctttctcctcgccctacaagatttcttcacgaatggcttaagaacgatacatggtcggatctagtattgagagaagctgatcgtccccttgtgcaggaggaggctgtagacaagtgttag

SEQ ID NO: 39630 - protein, 359 aa, Muscodor strobelii
  misc_feature: SGI Peptide ID NO. 573794
  misc_feature (6)..(333): NCBI GI: 261188586 Blast Desc: conserved [Ajellomyces dermatitidis SLH14081] gi|239593065|gb|EEQ75646.1| conserved [Ajellomyces dermatitidis SLH14081]
  misc_feature (10)..(317): NCBI GI: 256734193 Blast Desc: NECHADRAFT_35375 [Nectria haematococca mpVI 77-13-4]
  misc_feature (1)..(333): NCBI GI: 46117388 Blast Desc: FG04536.1 [Gibberella zeae PH-1]
  misc_feature (107)..(322): NCBI GI: 225554416 Blast Desc: conserved [Ajellomyces capsulatus G186AR]
  misc_feature (107)..(333): NCBI GI: 240273453 Blast Desc: conserved [Ajellomyces capsulatus H143]
  misc_feature (11)..(309): NCBI GI: 238845106 Blast Desc: conserved [Microsporum canis CBS 113480]
  misc_feature (9)..(327): NCBI GI: 115398820 Blast Desc: [Aspergillus terreus NIH2624] gi|114191882|gb|EAU33582.1| [Aspergillus terreus NIH2624]
  misc_feature (9)..(327): NCBI GI: 225555069 Blast Desc: conserved [Ajellomyces capsulatus G186AR]
  misc_feature (11)..(317): NCBI GI: 238841929 Blast Desc: conserved [Microsporum canis CBS 113480]
  misc_feature (10)..(276): NCBI GI: 240282092 Blast Desc: conserved [Ajellomyces capsulatus H143]
MGVNEWMLESIKEFFERRPVPSQEQCDQKAQDLLNSAFIRPVGMQGSLSYTVTAQTILSFRIPEGRLGGDNEKLAATIHGKIVPKATLMATLGDDSDKSKFLLVYAMPLLPGKSGLETLAFGPKLEEESISKHINFVTHLARYFAGNWLNPQKVAVDQLKNCREDTERRLTILEKDERFAYLRNSIDEIRGPRGISLLYSEKYRQVLAHGDLSETNLLIDPDDLSITGIIDWSLASIRPFGIEYSALRRCSGNMNAGGWSDYTCRDVTDGAFWSEFWKITGVNDPETRDEIKRNTETACKLGLIMRAAFTKTLDGKPLDVLSPRPTRFLHEWLKNDTWSDLVLREADRPLVQEEAVDKC

SEQ ID NO: 39631 - DNA, 681 bp, Muscodor strobelii
  misc_feature: SGI cDNA ID NO. 573795
  misc_feature: Encodes the peptide sequence at SEQ ID NO 39632
atggccatatctgaagcatgcccccctcagagtgcccttaatggtgtcattggggtgcattatgccgcctcaacaaaggatctaggatcatcactaaaagtctacaatgagctcccagatgatgccgatcaacgtgaagttccctatgacatgctaaagacactgaccagtattttcatccgccacaatgcttataagcattatggtctgcacttggtgcatgtacgtacggatgagctcgatggtccttaccatggccatatatataaactggtcggcgatggtttcatcccatacgagtaccggaaaggaactcttgactcggatttcctgggtatcagcaaggatttcttccgtgagcttgcagattttctgacgggacatggtttggacgacttactcgggctcgaggttcttgatcgtgccgaggatccttattgtggggagttcgttcttggataccagggcaccgtcttagttgagaacaaagatatcgcgaacggacgcgcgcgacgaaagactcaatttctcttcacgcctactcaagaaccggatcctatccaacctggcactacccactcggagacaacatatgagacacaccgggtttttgtcactaagaccttgactaatgtggatgaagtaatggaagtacttcgaaaagaacgaattattgactaa

SEQ ID NO: 39632 - protein, 226 aa, Muscodor strobelii
  misc_feature: SGI Peptide ID NO. 573795
  misc_feature (22)..(225): NCBI GI: 255950522 Blast Desc: Pc22g21310 [Penicillium chrysogenum Wisconsin 54-1255] gi|211593045|emb|CAP99419.1| Pc22g21310 [Penicillium chrysogenum Wisconsin 54-1255]
  misc_feature (18)..(225): NCBI GI: 225555070 Blast Desc: conserved [Ajellomyces capsulatus G186AR]
  misc_feature (11)..(225): NCBI GI: 261188588 Blast Desc: conserved [Ajellomyces dermatitidis SLH14081] gi|239593066|gb|EEQ75647.1| conserved [Ajellomyces dermatitidis SLH14081]
  misc_feature (22)..(204): NCBI GI: 121714517 Blast Desc: ACLA_054900 [Aspergillus clavatus NRRL 1] gi|119403023|gb|EAW13443.1| ACLA_054900 [Aspergillus clavatus NRRL 1]
  misc_feature (1)..(125): NCBI GI: 225554415 Blast Desc: conserved [Ajellomyces capsulatus G186AR]
  misc_feature (26)..(219): NCBI GI: 239610102 Blast Desc: conserved [Ajellomyces dermatitidis ER-3]
  misc_feature (35)..(225): NCBI GI: 240273452 Blast Desc: conserved [Ajellomyces capsulatus H143]
  misc_feature (35)..(225): NCBI GI: 240274813 Blast Desc: [Ajellomyces capsulatus H143]
MAISEACPPQSALNGVIGVHYAASTKDLGSSLKVYNELPDDADQREVPYDMLKTLTSIFIRHNAYKHYGLHLVHVRTDELDGPYHGHIYKLVGDGFIPYEYRKGTLDSDFLGISKDFFRELADFLTGHGLDDLLGLEVLDRAEDPYCGEFVLGYQGTVLVENKDIANGRARRKTQFLFTPTQEPDPIQPGTTHSETTYETHRVFVTKTLTNVDEVMEVLRKERIID

SEQ ID NO: 39633 - DNA, 1113 bp, Muscodor strobelii
  misc_feature: SGI cDNA ID NO. 573796
  misc_feature: Encodes the peptide sequence at SEQ ID NO 39634
atggctgattcccgcctattcaagcctctcaagataggcaagatcgaggtccaacaccgcataggcatggcatcactcactcgcatgagggcgacgcaagaccggataccaacgcctatgatgaaggaatactacactcagcgtgcctctgtgcctggtactctgatactgagtgaaggcaccttcataagttccacctgcggcggcttcccctacgcgccagggatctggaatcaggcacaaatcgatgcttggcgcgagatcacagacgccgtccatgccaagggttgcttcatgtactgtcagctcttcggtatggggcgcgctgcagacgccgcgactgctgcggccgagaatcaagaaatcgttgggcctagcgctattgcaatggatggtgacgcgcccgtgccgagagccatgaccgtcgccgagattgagcaggctatccaggatttcgcttcagctgctcgcaacgctatcgctgcgggtttcgatggtgtcgagtgtcatggggccaatgggtacctcgtcgaccagttcttgcaagatgtcagcaatcagcgtactgacgcatacggcggtagcatcgctaaccggtcgcggttcttggacgaaattctgcttgcaatggttgacgctgttggcgctgagagggttggactgcggctaagcccgtggagcacattccagggtatgaagatggcggacccagtgccacagttcactgacgtgatcaaacacgctgcttctcataaactcgcttatttaagtctcgttgagtccaggatctcaggtggccaacaagtctccgatggcgtcggcaacgagcgtcttgatttcgcgtacgacttatgggacggatcgatttttgtggctggaggatatcggacggaggaggcccgaaggcttgtagatgttgagcatccagataaagatattctcgtcttattcggccgacttttcatctcgaatcccgatatggtatatcgtgtcaagaaggcattgggtcttagcgcctacaacaggagcacattctattctcctatgtcgactgctggatacctcgactatccgtatagcaaggagtatcttgcgacgaacgcaagagcttga

SEQ ID NO: 39634 - protein, 370 aa, Muscodor strobelii
  misc_feature: SGI Peptide ID NO. 573796
  misc_feature (5)..(338): Pfam Id: PF00724 Pfam Desc: NADH:flavin oxidoreductase / NADH oxidase family
  misc_feature (1)..(365): NCBI GI: 212544734 Blast Desc: N-ethylmaleimide reductase, [Penicillium marneffei ATCC 18224] gi|210065490|gb|EEA19584.1| N-ethylmaleimide reductase, [Penicillium marneffei ATCC 18224]
  misc_feature (1)..(366): NCBI GI: 255946003 Blast Desc: Pc20g12840 [Penicillium chrysogenum Wisconsin 54-1255] gi|211588504|emb|CAP86613.1| Pc20g12840 [Penicillium chrysogenum Wisconsin 54-1255]
  misc_feature (1)..(353): NCBI GI: 154313430 Blast Desc: BC1G_05412 [Botryotinia fuckeliana B05.10] gi|150849481|gb|EDN24674.1| BC1G_05412 [Botryotinia fuckeliana B05.10]
  misc_feature (1)..(367): NCBI GI: 256724517 Blast Desc: NECHADRAFT_54988 [Nectria haematococca mpVI 77-13-4]
  misc_feature (1)..(367): NCBI GI: 261355376 Blast Desc: NADPH dehydrogenase [Verticillium albo-atrum VaMs.102]
  misc_feature (1)..(366): NCBI GI: 67904716 Blast Desc: AN9345.2 [Aspergillus nidulans FGSC A4] gi|40747256|gb|EAA66412.1| AN9345.2 [Aspergillus nidulans FGSC A4] gi|259488185|tpe|CBF87444.1| TPA: conserved [Aspergillus FGSC
  misc_feature (1)..(358): NCBI GI: 46102846 Blast Desc: FG00065.1 [Gibberella zeae PH-1]
  misc_feature (1)..(364): NCBI GI: 256727818 Blast Desc: NECHADRAFT_46448 [Nectria haematococca mpVI 77-13-4]
  misc_feature (1)..(368): NCBI GI: 169598728 Blast Desc: SNOG_02169 [Phaeosphaeria nodorum SN15] gi|111069261|gb|EAT90381.1| SNOG_02169 [Phaeosphaeria nodorum SN15]
  misc_feature (1)..(363): NCBI GI: 171691228 Blast Desc: protein product [Podospora anserina] gi|170945562|emb|CAP71674.1| protein product [Podospora anserina]
  misc_feature (1)..(362): SWISSPROT Homolog: EC 1.6.99.1 NADPH dehydrogenase
MADSRLFKPLKIGKIEVQHRIGMASLTRMRATQDRIPTPMMKEYYTQRASVPGTLILSEGTFISSTCGGFPYAPGIWNQAQIDAWREITDAVHAKGCFMYCQLFGMGRAADAATAAAENQEIVGPSAIAMDGDAPVPRAMTVAEIEQAIQDFASAARNAIAAGFDGVECHGANGYLVDQFLQDVSNQRTDAYGGSIANRSRFLDEILLAMVDAVGAERVGLRLSPWSTFQGMKMADPVPQFTDVIKHAASHKLAYLSLVESRISGGQQVSDGVGNERLDFAYDLWDGSIFVAGGYRTEEARRLVDVEHPDKDILVLFGRLFISNPDMVYRVKKALGLSAYNRSTFYSPMSTAGYLDYPYSKEYLATNARA

SEQ ID NO: 39635 - DNA, 333 bp, Muscodor strobelii
  misc_feature: SGI cDNA ID NO. 573797
  misc_feature: Encodes the peptide sequence at SEQ ID NO 39636
atgcctgtccgtattcccaaggccagaggcagcgagattgccaccttcggtgtcgctggcgtcggcgctttcgcccctttctatttcatgctccccagtgccgaagagcgcctagctgcacagactgccaagtgggcaccacgatgggagcgcaacatttcctacttcgctcctcctgcccagcgtatcgcccagcgtgccgagcctcacgtcgctcgcaccgtcaaaaagattgacgacaagctaccacttgagaagtacgccgtgaaggccgatgccagcatcaagaagggtattgaaaagagtgttcagcgaatgaacaagactgcataa

SEQ ID NO: 39636 - protein, 110 aa, Muscodor strobelii
  misc_feature: SGI Peptide ID NO. 573797
  misc_feature (1)..(97): NCBI GI: 145602705 Blast Desc: MGG_14154 [Magnaporthe grisea 70-15] gi|145011091|gb|EDJ95747.1| MGG_14154 [Magnaporthe grisea 70-15]
  misc_feature (1)..(101): NCBI GI: 261355408 Blast Desc: conserved [Verticillium albo-atrum VaMs.102]
  misc_feature (1)..(101): NCBI GI: 116194362 Blast Desc: CHGG_03779 [Chaetomium globosum CBS 148.51] gi|88179692|gb|EAQ87160.1| CHGG_03779 [Chaetomium globosum CBS 148.51]
  misc_feature (4)..(101): NCBI GI: 256730649 Blast Desc: [Nectria haematococca mpVI 77-13-4]
  misc_feature (1)..(99): NCBI GI: 46108994 Blast Desc: FG01379.1 [Gibberella zeae PH-1]
  misc_feature (1)..(107): NCBI GI: 171683625 Blast Desc: protein product [Podospora anserina] gi|170941772|emb|CAP67426.1| protein product [Podospora anserina]
  misc_feature (1)..(99): NCBI GI: 85105606 Blast Desc: NCU05236 [Neurospora crassa OR74A] gi|28923591|gb|EAA32764.1| conserved [Neurospora crassa OR74A]
MPVRIPKARGSEIATFGVAGVGAFAPFYFMLPSAEERLAAQTAKWAPRWERNISYFAPPAQRIAQRAEPHVARTVKKIDDKLPLEKYAVKADASIKKGIEKSVQRMNKTA

SEQ ID NO: 39637 - DNA, 2679 bp, Muscodor strobelii
  misc_feature: SGI EST ID NO. CUFF.95519.0
  misc_feature: Variant of the nucleotide sequence at SEQ ID NO 39635
gcgagtcaaggaatgtagaaggatagtatgatttgagttccgtctcgtcttgcctttgctctgctaccagtggcaacacagtcgttccatcgtgtggtttaaatgctggtgtctcccacctttcacgactattgttctctgtttcccttcgctcattaacatcaagcaacacgtatccaacatcgcctgattcatttcaagtgatcgaatgaaggaaccctgctcattatagcatttgccccagactcttccagagtcagacatctcaccaatctccactctacacaacacaaaatctatcaacatgcctgtccgtattcccaaggccagaggcagcgagattgccaccttcggtgtcgctggcgtcggcgctttcgcccctttctatttcatgctccccagtgccgaagagcgcctagctgcacagactgccaagtgggcaccacgatgggagcgcaacatttcctacttcgctcctcctgcccagcgtatcgcccagcgtgccgagcctcacgtcgctcgcaccgtcaaaaagattgacgacaagctaccacttgagaagtacgccgtgaaggccgatgccagcatcaagaagggtattgaaaagagtgttcagcgaatgaacaagactgcataagtcacagttcccacgaaggacttgtattatgaacggcatacggcaacgcagaggagttggagttatgatagtctaggactggttacggtttcggatgatgcatcgacacgtcctagggatatatggtaaagtcccaggcctgggcatagcgacaatgtcgcattggaatgaagttcagtccatcctctaggtagcgtattcaatatacgagctgccaaatgaactgttcgtgccatctctctcattgtgatagacatttcacgaattgcttagcagatctctcttatgtgtttacttggaatcaatttgcccgaagcaagtcttctaatgttttattcatactgagcctcggcagagactacgaagtaagcagcatcacaaaatctgatagcatccagcacactatgaaaacgagcagtctattttccctcaagaacgacctcgcaccttggcatctaaatcagcaaattcaagctcttgcgttcgtcgcaagatactccttgctatacggatagtcgaggtatccagcagtcgacataggagaatagaatgtgctcctgttgtaggcgctaagacccaatgccttcttgacacgatataccatatcgggattcgagatgaaaagtcggccgaataagacgagaatatctttatctggatgctcaacatctacaagccttcgggcctcctccgtccgatatcctccagccacaaaaatcgatccgtcccataagtcgtacgcgaaatcaagacgctcgttgccgacgccatcggagacttgttggccacctgagatcctggactcaacgagacttaaataagcgagtttatgagaagcagcgtgtttgatcacgtcagtgaactgtggcactgggtccgccatcttcataccctggaatgtgctccacgggcttagccgcagtccaaccctctcagcgccaacagcgtcaaccattgcaagcagaatttcgtccaagaaccgcgaccggttagcgatgctaccgccgtatgcgtcagtacgctgattgctgacatcttgcaagaactggtcgacgaggtacccattggccccatgacactcgacaccatcgaaacccgcagcgatagcgttgcgagcagctgaagcgaaatcctggatagcctgctcaatctcggcgacggtcatggctctcggcacgggcgcgtcaccatccattgcaatagcgctaggcccaacgatttcttgattctcggccgcagcagtcgcggcgtctgcagcgcgccccataccgaagagctgacagtacatgaagcaacccttggcatggacggcgtctgtgatctcgcgccaagcatcgatttgtgcctgattccagatccctggcgcgtaggggaagccgccgcaggtggaacttatgaaggtgccttcactcagtatcagagtaccaggcacagaggcacgctgagtgtagtattccttcatcataggcgttggtatccggtcttgcgtcgccctcatgcgagtgagtgatgccatgcctatgcggtgttggacctcgatcttgcctatcttgagaggcttgaataggcgggaatcagccattatgaatgagctttaagggtagttctcattggatagggtgagttcgttggtgtttggtagaggccgctgtcctcttcttcctgcgaaactagtatccatcgtgagtaagatattgagtgttggagctgccatcttatatagatgagcttcgcaagagataagttcatagtaccaactgatcggagcagttgagctgaataatcctcaggcccggaaattacctgaagtcaaactttttggtcttcactgagagaaaagctgcgttgttatgggacttggtggtatcacgctatccctaaaatggaaaatggtcctcgatgcttagttattgtacgcattttcaatcagcttgacatgacacgcaatgggcttcggaatgaagaaagtagatgaaagaactatcaattactaatctgtaagatattatcaatagccgattatcctatttttatgatccgca

SEQ ID NO: 39638 - DNA, 1551 bp, Muscodor strobelii
  misc_feature: SGI cDNA ID NO. 573798
  misc_feature: Encodes the peptide sequence at SEQ ID NO 39639
atgaatagttctctactagaatcaggcactacaatgagtgcacttgttgataccgagaagcagccgggtgcaagcgttgtttctattggttcaagctcaaatagtttaccaacgatcgacaaggaggttgagaagaggctgagatggaagactgacttaattttgatgcctgctcttgcattggcttacttaacacatacgctggaccgcgccaacctaggaaacgcaaagaccgatactctggtccaagatctgaatcttgtagggaatcaattcaatcttcttttgattctattctatgttccatacggtctattcaacgttccttttacgctgcttgcgaaacgctttaatccggccgtgattataccttcggtaatgacagtatggggtgcagtggctgcagcgtcttcggcatctaccaacttcggtggcctcttggctgcgaggatagtgatgggtgccgttgaagctgcattcttcccctgtgctgtttattactgctcattgttctatacgcgtcgagagttgagcttccgaactagtatcttcggttccatgggcttcattgccggcgccatctccggacttattgccttctccgtctttagatggcataaggctcttcatggctggcagtatctgtttctcattgagggttcgctgaccgtgggcgtgggacttttactcttcttgatccttccgcacagcattgagaagtcgcgatggttcacagaggaagagaagctgctggcccgacagcgtctggaacaagattctcaggatgttgataagacatttcgctgggaagatgtcaagaaggaatctaaggattggacgacctgggctttcaccttgatggcgctactctatggtgttggtgtcacgagtagttccaacttcttaccgaccatcgtcaagagaatcgcaatcatagcatcaaaagctaatctttacactgttgggcctaatctaactgcggcatttgttctgcttgcaacaacttttatctccgatcgtcttcaacagcgagccacgatcacatgtggaacgttatcagtatctttaatcgcttgggtgcttcttgcgacgctcgatttggtcaacaatgtggaggtcggatatttcttgacatatctaatcttattcggaacgttcactcccaatatcttagttcctgtgtggatagcttctaatacaacgacaactacgggtcgagcgtatcggctcggtctcaatttcatggcgcaaaacctggcaggcatcatcagctctcttgcgttccaggcaaaagatgcgcccgtctataggccggctttgataacggtcgcgagttttcagggtgctttcattatcctttgcgccgtcgtgtggaatcattacaggcgtctgaataagaaattggagagtggcgagattgttcacgtgagcggtgggaaagaacatcctgaataccgaacaccaagagacccgttacagagaaaaccctgtccgaccaccggtatgacacagcaccgagccctcataccggattcagcgcagatagagtga

SEQ ID NO: 39639 - protein, 516 aa, Muscodor strobelii
  misc_feature: SGI Peptide ID NO. 573798
  misc_feature (59)..(425): Pfam Id: PF07690 Pfam Desc: Major Facilitator Superfamily
  misc_feature (39)..(486): NCBI GI: 242770287 Blast Desc: vitamin H transporter, [Talaromyces stipitatus ATCC 10500] gi|218725144|gb|EED24561.1| vitamin H transporter, [Talaromyces stipitatus ATCC 10500]
  misc_feature (39)..(468): NCBI GI: 212537817 Blast Desc: conserved [Penicillium marneffei ATCC 18224] gi|210068806|gb|EEA22897.1| conserved [Penicillium marneffei ATCC 18224]
  misc_feature (2)..(486): NCBI GI: 189188116 Blast Desc: conserved [Pyrenophora tritici-repentis Pt-1C-BFP] gi|187972003|gb|EDU39502.1| conserved [Pyrenophora tritici-repentis Pt-1C-BFP]
  misc_feature (39)..(494): NCBI GI: 58258573 Blast Desc: High-affinity nicotinic acid transporter [Cryptococcus neoformans var. neoformans JEC21] gi|57222836|gb|AAW40880.1| High-affinity nicotinic acid transporter, [Cryptococcus var.
  misc_feature (39)..(494): NCBI GI: 134106531 Blast Desc: CNBA2760 [Cryptococcus neoformans var. neoformans B-3501A] gi|50260979|gb|EAL23629.1| CNBA2760 [Cryptococcus neoformans var. neoformans B-3501A]
  misc_feature (17)..(473): NCBI GI: 156050547 Blast Desc: SS1G_07861 [Sclerotinia sclerotiorum 1980] gi|154692261|gb|EDN91999.1| SS1G_07861 [Sclerotinia sclerotiorum 1980]
  misc_feature (40)..(463): NCBI GI: 225559977 Blast Desc: conserved [Ajellomyces capsulatus G186AR]
  misc_feature (39)..(488): NCBI GI: 169782514 Blast Desc: [Aspergillus oryzae RIB40] gi|83774463|dbj|BAE64586.1| protein product [Aspergillus oryzae]
  misc_feature (34)..(486): NCBI GI: 145251533 Blast Desc: An15g07590 [Aspergillus niger] gi|134082815|emb|CAK42646.1| protein product [Aspergillus niger]
  misc_feature (39)..(488): NCBI GI: 238492129 Blast Desc: allantoate permease, [Aspergillus flavus NRRL3357] gi|220695795|gb|EED52137.1| allantoate permease, [Aspergillus flavus NRRL3357]
MNSSLLESGTTMSALVDTEKQPGASVVSIGSSSNSLPTIDKEVEKRLRWKTDLILMPALALAYLTHTLDRANLGNAKTDTLVQDLNLVGNQFNLLLILFYVPYGLFNVPFTLLAKRFNPAVIIPSVMTVWGAVAAASSASTNFGGLLAARIVMGAVEAAFFPCAVYYCSLFYTRRELSFRTSIFGSMGFIAGAISGLIAFSVFRWHKALHGWQYLFLIEGSLTVGVGLLLFLILPHSIEKSRWFTEEEKLLARQRLEQDSQDVDKTFRWEDVKKESKDWTTWAFTLMALLYGVGVTSSSNFLPTIVKRIAIIASKANLYTVGPNLTAAFVLLATTFISDRLQQRATITCGTLSVSLIAWVLLATLDLVNNVEVGYFLTYLILFGTFTPNILVPVWIASNTTTTTGRAYRLGLNFMAQNLAGIISSLAFQAKDAPVYRPALITVASFQGAFIILCAVVWNHYRRLNKKLESGEIVHVSGGKEHPEYRTPRDPLQRKPCPTTGMTQHRALIPDSAQIE

SEQ ID NO: 39640 - DNA, 1344 bp, Muscodor strobelii
  misc_feature: SGI cDNA ID NO. 573799
  misc_feature: Encodes the peptide sequence at SEQ ID NO 39641
atgggggacccttttaccgataacgctgtcgcccaatctgcaccagcaagcccagctcacgaggcaaccgatccgcacctgaaggttatggaagaggacaagcaacagacggaggagattgctacccaaagcaacgaagatgagcaggacatcattgaagaaaaacctgacgcctaccgccccggtggttttcaccccgtctacataggcgatatcttcaatgatagatatgaggttttaaacaaaattgggttcggtggttattccactgtctggatcgttgaagatctaaagcatcggtatttcaagcgaacaacgcgcattctttgccctcaaaattctcagagccgattgctacgatgggcactacgatatcttcgagagggagattctaatccacctcagggggggcaccgtaaagcttttggctatgattttgttacccacctcgttgacgacttcgtacacagcggcccgaatggaaaacacatgtgccttgtatttgagctgtatggcgaaactctcctgagctttggagtttggtttggagcagatgggaaaggagacaggatccctgacggcgttatgcagcgatttaccatccagcttttgggcgcattagattacgcccacgacatgaatgtcatccacacagacatacaacccagcaacatatttgtcaaatttagagattactccttgattgagtcaagatacctcaagctcatgcccgtaccccagcaagacaggaaggaaacacaatacacggtagttcgtacaatgcctcttcgtgatgcctatttcaacgactccgatcactttcgccatttcgacattgctcttggagactggggcgtcgcaagttggtctgataaacacttagctgaattgattcagcctgtcgcacttcgttccccggaggcgctaatccgagcaccgtgggatccgcagaccgacttctggaatcttggtgctttgctcccagaactattccgcaatattcgcgtgttcagtggcagggttccgcctgacgggcactatgagcttagggagcatatcggcgagattgtagatttcttcggtccctttccgcggtcgctcctagataaaggcgacccagaaatcgtccaagcaatattcgacgataacggaatggtcaaagggcgcacatgcagcgaaaccccccgtaatttggatgtactcgcacgtaaccttcatgaggagacgaaagaagagttcatttcattcctgcaagccatcatgcagatcgaacctcagaaacgaccgagccccgaggacctccttcgtcatcccttcttgaaggcattgccgccaaaagaatga

SEQ ID NO: 39641 - protein, 447 aa, Muscodor strobelii
  misc_feature: SGI Peptide ID NO. 573799
  misc_feature (304)..(440): Pfam Id: PF00069 Pfam Desc: Protein kinase domain
  misc_feature (153)..(228): Pfam Id: PF00069 Pfam Desc: Protein kinase domain
  misc_feature (49)..(446): NCBI GI: 256724096 Blast Desc: NECHADRAFT_86322 [Nectria haematococca mpVI 77-13-4]
  misc_feature (52)..(443): NCBI GI: 169765326 Blast Desc: [Aspergillus oryzae RIB40] gi|83764989|dbj|BAE55132.1| protein product [Aspergillus oryzae]
  misc_feature (54)..(443): NCBI GI: 119185849 Blast Desc: CIMG_02972 [Coccidioides immitis RS]
  misc_feature (52)..(443): NCBI GI: 238838530 Blast Desc: protein kinase dsk1 [Microsporum canis CBS 113480]
  misc_feature (172)..(443): NCBI GI: 238481837 Blast Desc: srpk, [Aspergillus flavus NRRL3357] gi|220700207|gb|EED56545.1| srpk, [Aspergillus flavus NRRL3357]
  misc_feature (66)..(434): NCBI GI: 121704583 Blast Desc: serine-threonine protein kinase, [Aspergillus clavatus NRRL 1] gi|119398700|gb|EAW09129.1| serine-threonine protein kinase, [Aspergillus clavatus NRRL 1]
  misc_feature (64)..(434): NCBI GI: 121710522 Blast Desc: protein kinase, [Aspergillus clavatus NRRL 1] gi|119401027|gb|EAW11451.1| protein kinase, [Aspergillus clavatus NRRL 1]
  misc_feature (42)..(440): NCBI GI: 261192767 Blast Desc: serine protein kinase Sky1 [Ajellomyces dermatitidis SLH14081] gi|239589272|gb|EEQ71915.1| serine protein kinase Sky1 [Ajellomyces dermatitidis SLH14081]
  misc_feature (42)..(440): NCBI GI: 239610191 Blast Desc: serine protein kinase Sky1 [Ajellomyces dermatitidis ER-3]
  misc_feature (45)..(441): NCBI GI: 225680756 Blast Desc: conserved [Paracoccidioides brasiliensis Pb03]
MGDPFTDNAVAQSAPASPAHEATDPHLKVMEEDKQQTEEIATQSNEDEQDIIEEKPDAYRPGGFHPVYIGDIFNDRYEVLNKIGFGGYSTVWIVEDLKHRYFKRTTRILCPQNSQSRLLRWALRYLREGDSNPPQGGHRKAFGYDFVTHLVDDFVHSGPNGKHMCLVFELYGETLLSFGVWFGADGKGDRIPDGVMQRFTIQLLGALDYAHDMNVIHTDIQPSNIFVKFRDYSLIESRYLKLMPVPQQDRKETQYTVVRTMPLRDAYFNDSDHFRHFDIALGDWGVASWSDKHLAELIQPVALRSPEALIRAPWDPQTDFWNLGALLPELFRNIRVFSGRVPPDGHYELREHIGEIVDFFGPFPRSLLDKGDPEIVQAIFDDNGMVKGRTCSETPRNLDVLARNLHEETKEEFISFLQAIMQIEPQKRPSPEDLLRHPFLKALPPKE

SEQ ID NO: 39642 - DNA, 567 bp, Muscodor strobelii
  misc_feature: SGI cDNA ID NO. 573800
  misc_feature: Encodes the peptide sequence at SEQ ID NO 39643
atgcctaaaaactatggacgaggaggtaagaccttccgcaagggcaagaccagccaagctaaccatgacagcgctcaacttctgctcaaggaagatgaacaccagcactatgcacgtgtagaaaaagctcttggctcagggcactttcaagtcaagacgttctcttcgggcgtttatggccaaatccgcattggactaagacgtggtgcgctgagaagacgacgagtctacgtcaacacaggtgacatagtcttggttgcactacgagatttcaacgaggatgatgtgtgcgacatcatccacaagtactcgccatcaaacgtaaaagagctgcagaagctcggtgagctgccgaaagatgctcttgtcgatcaactggtgaatacgggccaagacgtcgaagacatcacgttcctagacgatgatgatgatgacggcacagagacagtagaggagatcaagcagaaggtgtctctacctcgctccgagtattaccctgacgacgatgagcaagttgaggaaggaccttccaagccaaagggcaaagttgacattgattccatttaa

SEQ ID NO: 39643 - protein, 188 aa, Muscodor strobelii
  misc_feature: SGI Peptide ID NO. 573800
  misc_feature (32)..(102): Pfam Id: PF01176 Pfam Desc: Translation initiation factor 1A / IF-1
  misc_feature (1)..(153): NCBI GI: 241607912 Blast Desc: translation initiation factor 1A [Ixodes scapularis] gi|215500703|gb|EEC10197.1| translation initiation factor 1A [Ixodes scapularis]
  misc_feature (1)..(151): NCBI GI: 156358424 Blast Desc: [Nematostella vectensis] gi|156211305|gb|EDO32419.1| [Nematostella vectensis]
  misc_feature (1)..(148): NCBI GI: 242781527 Blast Desc: eukaryotic translation initiation factor eIF-1A subunit, [Talaromyces stipitatus ATCC 10500] gi|218719965|gb|EED19384.1| eukaryotic translation initiation
  misc_feature (1)..(159): NCBI GI: 221056598 Blast Desc: translation initiation factor eif-1a [Plasmodium knowlesi strain H] gi|193809508|emb|CAQ40210.1| translation initiation factor eif-1a, [Plasmodium knowlesi strain H]
  misc_feature (1)..(151): NCBI GI: 260835114 Blast Desc: BRAFLDRAFT_122184 [Branchiostoma floridae] gi|229297932|gb|EEN68563.1| BRAFLDRAFT_122184 [Branchiostoma floridae]
  misc_feature (1)..(138): NCBI GI: 254569122 Blast Desc: Translation initiation factor eIF1A [Pichia pastoris GS115] gi|238031468|emb|CAY69391.1| Translation initiation factor eIF1A [Pichia pastoris GS115]
  misc_feature (1)..(144): NCBI GI: 212526682 Blast Desc: eukaryotic translation initiation factor eIF-1A subunit, [Penicillium marneffei ATCC 18224] gi|210072896|gb|EEA26983.1| eukaryotic translation initiation
  misc_feature (1)..(147): NCBI GI: 170588051 Blast Desc: protein synthesis factor [Brugia malayi] gi|158593000|gb|EDP31595.1| protein synthesis factor, [Brugia malayi]
  misc_feature (1)..(159): NCBI GI: 156099089 Blast Desc: translation initiation factor eIF-1A [Plasmodium vivax SaI-1] gi|148804421|gb|EDL45820.1| translation initiation factor eIF-1A, [Plasmodium vivax]
  misc_feature (1)..(159): NCBI GI: 258597404 Blast Desc: translation initiation factor eIF-1A, [Plasmodium falciparum 3D7] gi|254832713|gb|AAN36027.2| translation initiation factor eIF-1A, [Plasmodium falciparum 3D7]
MPKNYGRGGKTFRKGKTSQANHDSAQLLLKEDEHQHYARVEKALGSGHFQVKTFSSGVYGQIRIGLRRGALRRRRVYVNTGDIVLVALRDFNEDDVCDIIHKYSPSNVKELQKLGELPKDALVDQLVNTGQDVEDITFLDDDDDDGTETVEEIKQKVSLPRSEYYPDDDEQVEEGPSKPKGKVDIDSI

SEQ ID NO: 39644 - DNA, 483 bp, Muscodor strobelii
  misc_feature: SGI cDNA ID NO. 573801
  misc_feature: Encodes the peptide sequence at SEQ ID NO 39645
atgtcggggagcgactttgatcagcaatacaacgatgcacaaagcgatttcaatgatgcacaagacagcttcaacaaaactgcaacggccatttctaccggttggattataggaattgttattatcgctatagccgtccttgctagcgtcgtgacagtcattattttcttgatgcgccggaagaaacgcagagcccattaccaggagttcaatcaaatggtcaacggcacttcgtatgactataacggccaaagtcacaacatgagcacatatgatcctccccagcaaccggcaatatttcagcagccacaacaatacaacccatatccagaggtccatggatctgaaccgccacaacgctttgaagctcatgatacaggcgtgcgtgaagctccagacacatcactcacaaagtcaccagcaccgacatacagcactggaccaccagcagagcttgctggatacgagagagcgaacaaatga

SEQ ID NO: 39645 - protein, 160 aa, Muscodor strobelii
  misc_feature: SGI Peptide ID NO. 573801
MSGSDFDQQYNDAQSDFNDAQDSFNKTATAISTGWIIGIVIIAIAVLASVVTVIIFLMRRKKRRAHYQEFNQMVNGTSYDYNGQSHNMSTYDPPQQPAIFQQPQQYNPYPEVHGSEPPQRFEAHDTGVREAPDTSLTKSPAPTYSTGPPAELAGYERANK

SEQ ID NO: 39646 - DNA, 1306 bp, Muscodor strobelii
  misc_feature: SGI EST ID NO. CUFF.95560.0
  misc_feature: Variant of the nucleotide sequence at SEQ ID NO 39644
attacatcatgtgaagggcaaatgttaatactaagaggagaggaccatgccttgcttgagtagagtctctcttctagtcgtgttattgataattgtgaatcaacactcatttccattcatcagcgataaagccaggagactccatttgatcgaataacagcaccgattcctaatttgttaagggctcaagcagaaattccaatctgagagtattattcataggccctctggcaatacatcgagaatgtcggggagcgactttgatcagcaatacaacgatgcacaaagcgatttcaatgatgcacaagacagcttcaacaaaactgcaacggccatttctaccggttggattataggaattgttattatcgctatagccgtccttgctagcgtcgtgacagtcattattttcttgatgcgccggaagaaacgcagagcccattaccaggagttcaatcaaatggtcaacggcacttcgtatgactataacggccaaagtcacaacatgagcacatatgatcctccccagcaaccggcaatatttcagcagccacaacaatacaacccatatccagaggtccatggatctgaaccgccacaacgctttgaagctcatgatacaggcgtgcgtgaagctccagacacatcactcacaaagtcaccagcaccgacatacagcactggaccaccagcagagcttgctggatacgagagagcgaacaaatgatatccggtcaggtgtgagggccgaacaagagtcgaatagattgacgcgcctgagtctcgtatattactatagcttcattttaccatctaaacatcgtcactatacgcctacgatactcagattaaagacgccaaattgggaggtgcatctcagcgtgtcattgggcgtattatcgtcgtctagcatttggcctgtgctacataggcctggccatgaacccactgaatgacgatgaagacgatatttgagcgaccacatcaaagttggtcaatgcgggcctattgatacttgatggtatatgtactcgttgcaggttctttcacatactcagagatgatgtctctgtcgtaaatgaatacagtataactatttgttaataaaatatgcaaagagaaatagacataatggttttgcacaattttctagcattctcgtctttctgagagctgtctcaacatacatcagcttcaattgcccacgtgacatcgacaggctctctccttttttttctctcttatctctttttttttcatgcacgtgaggtcttggaattagtggatgacgtccctcacgatgctc

SEQ ID NO: 39647 - DNA, 1539 bp, Muscodor strobelii
  misc_feature: SGI cDNA ID NO. 573802
  misc_feature: Encodes the peptide sequence at SEQ ID NO 39648
atggccatcaccaatttattagcatcgccttgggccattggtgccgcatttgtagccttcattgcaatctactatatctatccatactacaccacatatgggcatcttcggagcgtaccagctccctttccagcaccgtttacaaactggtggcttttatcaacatgccgccgcggcaaaagatacttgataatggatgagattcacaagaagctgggaccaatagttcgaatccaacccaaccacgtaagtgttgctgatgatgatgctattgtcacgatatacggacatggcaatgggttcttgaagtcggagttctacgatgcgtttgtgtcaattaagaggggtcttttcaatacacgagaccgccacgagcacacgcgaaagaggaaattggtttcccatacctttgcgcccaaatccatctcgcaattcgagccatacatctctgaaaatctgactacttttgtcgaccggtgggacgatctagccgaaaagacaacggaactcgataagtctgctcacgttgactgtcttaaatggttcaactacgtagcctttgacacaattggagatttggcttttggtgcaccatttggcatgttgaagcgtggcgaagatctcgccgaggtacgaacatcagtcaatgcgaagcctatatatgccccagccgtcgaaattctgaatcgtcgaggcgaagtatccgcgaccctaggctgctatccgtatatcaagccctacgccaaatggctacccgatcctttcttctcgcaaggacttacagctgttgagaatctcgccggtatcgctattgcccgcgtcaaggaccgtcttgacaatccacctgacatcaaccgcaaagatctccttgcccgactgcaagaggggcgggacgagaacggcgaaccccttggttttgaagagctgacagccgaggctttaacacagcttatcgctggatcagatacaacgtcgaatacgtcatgtgcactcctgtatcatgttgctcgaacaccgggcgtgttacagaagctgcaaaaagagctcgatgccgcaatccccagtaatgagactaaagtcccagactatgaagcaattaggaacctaccatacctagaggcagtcatcaacgaaacaatgcgcattcattcaacatccggcatcggcctgcctcgtcagatcccctacgattcacccggcatccatctacacggctattacttcccaccaggcacggtgttgagcgtgccgacatacacaattcaccactcagagaagatttggggccccgacgctgaagaattccgccctgagcgctggtatgacgcgacaccgcgccagaaaaatgctttcatccctttcagccacggtccccgatcatgtgtcgggcgcaacgtggcagaaatggagatgaagatgattgcagcaacatggatgcgaagatacgacgtctccttgagacaggatgtgatggaaacccgggaaggattcctgaggaagcctttgggattggaaattggtttcagaaggcggttttga

SEQ ID NO: 39648 - protein, 512 aa, Muscodor strobelii
  misc_feature: SGI Peptide ID NO. 573802
  misc_feature (40)..(508): Pfam Id: PF00067 Pfam Desc: Cytochrome P450
  misc_feature (1)..(511): NCBI GI: 18376189 Blast Desc: benzoate 4-monooxygenase cytochrome P450 [Neurospora crassa]
  misc_feature (1)..(511): NCBI GI: 171693297 Blast Desc: protein product [Podospora anserina] gi|170946597|emb|CAP73399.1| protein product [Podospora anserina]
  misc_feature (1)..(511): NCBI GI: 46137871 Blast Desc: FG10451.1 [Gibberella zeae PH-1]
  misc_feature (1)..(511): NCBI GI: 261352823 Blast Desc: benzoate 4-monooxygenase [Verticillium albo-atrum VaMs.102]
  misc_feature (1)..(512): NCBI GI: 116198705 Blast Desc: CHGG_07508 [Chaetomium globosum CBS 148.51] gi|88178787|gb|EAQ86255.1| CHGG_07508 [Chaetomium globosum CBS 148.51]
  misc_feature (1)..(511): NCBI GI: 46127417 Blast Desc: FG08086.1 [Gibberella zeae PH-1]
  misc_feature (1)..(511): NCBI GI: 256722479 Blast Desc: NECHADRAFT_35086 [Nectria haematococca mpVI 77-13-4]
  misc_feature (1)..(511): NCBI GI: 189203563 Blast Desc: cytochrome P450 3A3 [Pyrenophora tritici-repentis Pt-1C-BFP] gi|187985216|gb|EDU50704.1| cytochrome P450 3A3 [Pyrenophora tritici-repentis Pt-1C-BFP]
  misc_feature (1)..(511): NCBI GI: 169602521 Blast Desc: SNOG_04264 [Phaeosphaeria nodorum SN15] gi|111066904|gb|EAT88024.1| SNOG_04264 [Phaeosphaeria nodorum SN15]
  misc_feature (1)..(511): NCBI GI: 154319157 Blast Desc: BC1G_02530 [Botryotinia fuckeliana B05.10] gi|150856961|gb|EDN32153.1| BC1G_02530 [Botryotinia fuckeliana B05.10]
  misc_feature (35)..(511): SWISSPROT Homolog: EC 1.14.13.12 Benzoate 4-monooxygenase
MAITNLLASPWAIGAAFVAFIAIYYIYPYYTTYGHLRSVPAPFPAPFTNWWLLSTCRRGKRYLIMDEIHKKLGPIVRIQPNHVSVADDDAIVTIYGHGNGFLKSEFYDAFVSIKRGLFNTRDRHEHTRKRKLVSHTFAPKSISQFEPYISENLTTFVDRWDDLAEKTTELDKSAHVDCLKWFNYVAFDTIGDLAFGAPFGMLKRGEDLAEVRTSVNAKPIYAPAVEILNRRGEVSATLGCYPYIKPYAKWLPDPFFSQGLTAVENLAGIAIARVKDRLDNPPDINRKDLLARLQEGRDENGEPLGFEELTAEALTQLIAGSDTTSNTSCALLYHVARTPGVLQKLQKELDAAIPSNETKVPDYEAIRNLPYLEAVINETMRIHSTSGIGLPRQIPYDSPGIHLHGYYFPPGTVLSVPTYTIHHSEKIWGPDAEEFRPERWYDATPRQKNAFIPFSHGPRSCVGRNVAEMEMKMIAATWMRRYDVSLRQDVMETREGFLRKPLGLEIGFRRRF

SEQ ID NO: 39649 - DNA, 417 bp, Muscodor strobelii
  misc_feature: SGI cDNA ID NO. 573803
  misc_feature: Reduced expression when VOC is produced
  misc_feature: Encodes the peptide sequence at SEQ ID NO 39650
atggcaacaaaccgacaacgcgctcgtgaatttcgcgagtcagttctcgcaatcgcccaggctattttcgcatttctagtcatctttatcttctttctcgcctttattatccaatccaaagccatcgtgataccacaatggggcaaaacgtttcaaggcgtggcacccgaggaccaaggaccaatggctgcagctcttctaacggtagtcatcatcttatccgcgatcttggtagcagctggagcgtatatggagaacaaattgggcatgcacgcatgcgagatgcttgtgagcacgggtcatgcgaccgagtgccgaacagaacgatctcattcattcccagacgatctacattatcactatgaagagcatggattcgttcacacatcaattgtgaaatttgccatcgccgactga

SEQ ID NO: 39650 - protein, 138 aa, Muscodor strobelii
  misc_feature: SGI Peptide ID NO. 573803
  misc_feature: Useful for introducing or modulating the production of volatile compounds
MATNRQRAREFRESVLAIAQAIFAFLVIFIFFLAFIIQSKAIVIPQWGKTFQGVAPEDQGPMAAALLTVVIILSAILVAAGAYMENKLGMHACEMLVSTGHATECRTERSHSFPDDLHYHYEEHGFVHTSIVKFAIAD

SEQ ID NO: 39651 - DNA, 4167 bp, Muscodor strobelii
  misc_feature: SGI EST ID NO. CUFF.95564.0
  misc_feature: Variant of the nucleotide sequence at SEQ ID NO 39649
gcggagtcaaggcttgcagcactcataaagtgtggcacttggattggccgatgacgatcatgacagggttgggcgttgctttcgtgatcccgtttatgactactgacagttgatggatctgatggaatgcagtggccccaaggctcgctgacttgtcgctggcgcagccgccttttctaaaaccgagtaaaagtccatccgatcatccgcagcccaaacccgaccggatttctcatcagtttttcggtcagcttgactgatcgtgagattttccctctatttctctgtttcccctccctcactggcgccatcgctcttcgcctagctaattgccaactcccacctaatatttcaagcgtccacagcaaagctctttgcaaccatcactaccgttccacttacatttagccccaccagcaagacccaacgctgatctctaagattctgcttctcagtccgatcaaatctcaacatcgattgcatcgcgattgcctctcctgtcgccaaagcatcgaagcaagatggcaacaaaccgacaacgcgctcgtgaatttcgcgagtcagttctcgcaatcgcccaggctattttcgcatttctagtcatctttatcttctttctcgcctttattatccaatccaaagccatcgtgataccacaatggggcaaaacgtttcaaggcgtggcacccgaggaccaaggaccaatggctgcagctcttctaacggtagtcatcatcttatccgcgatcttggtagcagctggagcgtacctggcacggcatgttacgatgtagaacgccgcaggactcgagtgcagagattgcctcgagacaagtaaagaaacgcaggcatgacctcaaaaaggtcgatctatcatatccgacacaacataaggtatatggagaacaaattgggcatgcacgcatgcgagatgcttgtgagcacgggtcatgcgaccgagtgccgaacagaacgatctcattcattcccagacgatctacattatcactatgaagagcatggattcgttcacacatcaattgtgaaatttgccatcgccgactgataagacacagatcttgaatggacacccccaatgccgttcatcgaaaacatgccgcgacacatagaagatgacgaacgccacaattccgagctgcggggagaagagactcggctctggctgcacatgcaatgccgcttcacaaaacgtgtcaaccatcactgtcgcgtcgatatgtggccttttcacccctccttcgacattcaataccttaccgacaaaactaaatggtggattaagttgcggcaggacgcgatgacggacttactgctgcagcatgggcgaagacgggaatgtcgcagagggatcggggcgatcattgtgggctagccttgaattggtctgaaaacgccactaaacccggctacgataccttaaatcgccaccagaaattccaattattgagcccctgtcgacagcatcccgaccgcatccttgtgtcaatcggacgcagatgaaatttcggcaggacgatcatgaaccattccgaacaaagaaaagtagcacatttatattgctgctacgattgcctatttgcttgaccaggcagttcatgactacttccaggcggaaggttgatccgaaccgactaatgaatccctattaggatcgtggcgtcagcttagacggggtttgaaagcataaaaggctcccttaaccgacgcaccaacgaatcatttgctggtgactgtggtggcaggatcgagccgaggattatgattacccttcagaaattcaatgaagtagatatagggatggctgatgtctacctggttatgggtctatcggattgttcttgatagatatcgattgccaaatcaatcaaactttttcagcaagagctactctgtctgccgaccaagcgcaattgggtgccaaatcaggatgacgagacatgattcgaaagtgttaggttttccgaatgtagacggaataggacacggttttcatgtttcttgatgaaattgatctctgcatgcctatgtacgtcatccctgacatttcatgaacctcgagatgaaatattcacagtattcaatacaaactaaggaccaatccgttgtccaagccaatattccgtcatcatcaggtgtacgatattcaaaaccgccttctgaaaccaatttccaatcccaaaggcttcctcaggaatccttcccgggtttccatcacatcctgtctcaaggagacgtcgtatcttcgcatccatgttgctgcaatcatcttcatctccatttctgccacgttgcgcccgacacatgatcggggaccgtggctgaaagggatgaaagcatttttctggcgcggtgtcgcgtcataccagcgctcagggcggaattcttcagcgtcggggccccaaatcttctctgagtggtgaattgtgtatgtcggcacgctcaacaccgtgcctggtgggaagtaatagccgtgtagatggatgccgggtgaatcgtaggggatctgacgaggcaggccgatgccggatgttgaatgaatgcgcattgtttcgttgatgactgcctctaggtatggtaggttcctaattgcttcatagtctgggactttagtctcattactggggattgcggcatcgagctctttttgcagcttctgtaacacgcccggtgttcgagcaacatgatacaggagtgcacatgacgtattcgacgttgtatctgatccagcgataagctgtgttaaagcctcggctgtcagctcttcaaaaccaaggggttcgccgttctcgtcccgcccctcttgcagtcgggcaaggagatctttgcggttgatgtcaggtggattgtcaagacggtccttgacgcgggcaatagcgataccggcgagattctcaacagctgtaagtccttgcgagaagaaaggatcgggtagccatttggcgtagggcttgatatacggatagcagcctagggtcgcggatacttcgcctcgacgattcagaatttcgacggctggggcatatataggcttcgcattgactgatgttcgtacctcggcgagatcttcgccacgcttcaacatgccaaatggtgcaccaaaagccaaatctccaattgtgtcaaaggctacgtagttgaaccatttaagacagtcaacgtgagcagacttatcgagttccgttgtcttttcggctagatcgtcccaccggtcgacaaaagtagtcagattttcagagactattgcctttgttattatttcaacttccagtttatggcagtgcacatctgagacatactgtatggctcgaattgcgagatggatttgggcgcaaaggtatgggaaaccaatttcctctttcgcgtgtgctcgtggcggtctcgtgtattgaaaagacccctcttaattgacacaaacgcatcgtagaactccgacttcaagaacccattgccatgtccgtatatcgtgacaatagcatcatcatcagcaacacttacgtggttgggttggattcgaactattggtcccagcttcttgtgaatctcatccattatcaagtatcttttgccgcggcggcatgttgataaaagccaccagtttgtaaacggtgctggaaagggagctggtacgctccgaagatgcccatatgtggtgtagtatggatagatatagtagattgcaatgaaggctacaaatgcggcaccaatggcccaaggcgatgctaataaattggtgatggccattgtgataccagttattgacgtctcgcagcgatagtcgagatgcgatgcgccaaggatccgagtttacgcaacctggtagaagatcatgggactcatggaaaccgggctgagctccaggttatattcaacccaagagtgacctatcactaccgcaggcagtcgccgaagagccgatgtaatgtaggataccgaggaaatctagcaaatccctgggctgtagcaaaactgccagctattgcgacagtctgaccaactcgaggtgcatgctttgcatgagcatcataatggcgttcattcgtggagggccacatagcgcaaaacgggttggtcttctcatgcccacttgcgggacacccgcgaagttccccgcacaacatgctggtcactaggtattttaagtaggcc

SEQ ID NO: 39652 - DNA, 295 bp, Muscodor strobelii
  misc_feature: SGI cDNA ID NO. 573804
  misc_feature: Elevated expression when VOC is produced
  misc_feature: Encodes the peptide sequence at SEQ ID NO 39653
atgatcactcatctcggctgccttgtagcctgtccggcctatcccgatgaagaccaacttggcgccgttcttagacaaatggtcgatggtctgctatatctcgacgcgcaaggcctaaattgcggtggcctcgattgcaaccaggttgcgctaaatctgagtggcgacgtcaagctgatggtccacgagtttaaacagaacgcggcaggcgaaagcaccgatgccaacatgatgagagatctagggcggatcacgctgcaactcatgtacaagactgaatcggaccaagttatca

SEQ ID NO: 39653 - protein, 98 aa, Muscodor strobelii
  misc_feature: SGI Peptide ID NO. 573804
  misc_feature (1)..(91): NCBI GI: 156050909 Blast Desc: SS1G_08042 [Sclerotinia sclerotiorum 1980] gi|154692442|gb|EDN92180.1| SS1G_08042 [Sclerotinia sclerotiorum 1980]
  misc_feature (8)..(95): NCBI GI: 238492567 Blast Desc: conserved [Aspergillus flavus NRRL3357] gi|220696014|gb|EED52356.1| conserved [Aspergillus flavus NRRL3357]
  misc_feature (8)..(91): NCBI GI: 242797852 Blast Desc: conserved [Talaromyces stipitatus ATCC 10500] gi|218716392|gb|EED15813.1| conserved [Talaromyces stipitatus ATCC 10500]
  misc_feature (8)..(91): NCBI GI: 242763421 Blast Desc: conserved [Talaromyces stipitatus ATCC 10500] gi|218723767|gb|EED23184.1| conserved [Talaromyces stipitatus ATCC 10500]
  misc_feature (8)..(96): NCBI GI: 154278106 Blast Desc: [Ajellomyces capsulatus NAm1] gi|150413461|gb|EDN08844.1| [Ajellomyces capsulatus NAm1]
  misc_feature (5)..(96): NCBI GI: 226280156 Blast Desc: [Paracoccidioides brasiliensis Pb01]
  misc_feature (2)..(96): NCBI GI: 255938876 Blast Desc: Pc14g02150 [Penicillium chrysogenum Wisconsin 54-1255] gi|211584829|emb|CAP74356.1| Pc14g02150 [Penicillium chrysogenum Wisconsin 54-1255]
  misc_feature (5)..(96): NCBI GI: 255951751 Blast Desc: Pc23g00830 [Penicillium chrysogenum Wisconsin 54-1255] gi|211904263|emb|CAP79577.1| Pc23g00830 [Penicillium chrysogenum Wisconsin 54-1255]
  misc_feature (5)..(91): NCBI GI: 226292434 Blast Desc: conserved [Paracoccidioides brasiliensis Pb18]
  misc_feature: Useful for introducing or modulating the production of volatile compounds
MITHLGCLVACPAYPDEDQLGAVLRQMVDGLLYLDAQGLNCGGLDCNQVALNLSGDVKLMVHEFKQNAAGESTDANMMRDLGRITLQLMYKTESDQVI

SEQ ID NO: 39654 - DNA, 443 bp, Muscodor strobelii
  misc_feature: SGI EST ID NO. CUFF.95576.0
  misc_feature: Variant of the nucleotide sequence at SEQ ID NO 39652
ttctcgacggacgatacattgcacgttgtgttcgaggacatgatcactcatctcggctgccttgtagcctgtccggcctatcccgatgaagaccaacttggcgccgttcttagacaaatggtcgatggtctgctatatctcgacgcgcaaggcctaaattgcggtggcctcgattgcaaccaggttgcgctaaatctgagtggcgacgtcaagctgatggtccacgagtttaaacagaacgcggcaggcgaaagcaccgatgccaacatgatgagagatctagggcggatcacgctgcaactcatgtacaagactgaatcggaccaagttatcagtgcgcatagtcgtggaagacaacgtcgagtgtctttgctttttataaaacgttgcagtctgcaaattcaatatcgagcttgttgcaggtgcgtggagttgatttattc

SEQ ID NO: 39655 - DNA, 309 bp, Muscodor strobelii
  misc_feature: SGI cDNA ID NO. 573805
  misc_feature: Elevated expression when VOC is produced
  misc_feature: Encodes the peptide sequence at SEQ ID NO 39656
gacaccatgaaccctacttctcgacgctcatcaagcatctactccgataccttcgagctccaggatctcgttgatcggctcgatcaggcgacgtgggaacaagaagtgcttacagtctacgccctggaaggagagcgagatatgtggcagcaagaactggtgagggagcaggtggtatggtcatctatccatgaggccttgttgaagactagagacattgtatggctggtcagacagctgattgaggagcacaaaggccaggcagagacagagcggcggaaatggatggccaacagcaccgtaatctga

SEQ ID NO: 39656 - protein, 102 aa, Muscodor strobelii
  misc_feature: SGI Peptide ID NO. 573805
  misc_feature: Useful for introducing or modulating the production of volatile compounds
DTMNPTSRRSSSIYSDTFELQDLVDRLDQATWEQEVLTVYALEGERDMWQQELVREQVVWSSIHEALLKTRDIVWLVRQLIEEHKGQAETERRKWMANSTVI

SEQ ID NO: 39657 - DNA, 1633 bp, Muscodor strobelii
  misc_feature: SGI EST ID NO. CUFF.95578.2
  misc_feature: Variant of the nucleotide sequence at SEQ ID NO 39655
catgaaccctacttctcgacgctcatcaagcatctactccgataccttcgagctccaggatctcgttgatcggctcgatcaggcgacgtgggaacaagaagtgcttacagtctacgccctggaaggagagcgagatatgtggcagcaagaactggtgagggagcaggtggtatggtcatctatccatgaggccttgttgaagactagagacattgtatggctggtcagacagctgattgaggagcacaaaggccaggcagagacagagcggcggaaatggatggccaacagcaccgtaatctgatctgttagccacagtagggtgaatcaaacattcgatggttcgagatatgataagaaggattattctcgtggaactatcaccctaatcgatgcagcagaaagacagtggagcagtttctgttacaagattctacgtgaagatgactggagagcttgctatcagaagctcaccttcgatacgatataatatttcttgaactggtgtctaagccaacgaagaggcaaaagcaatcgggcaaaagctgggctgaagaagaaatcctcattggtcaccctttggtgcacattccgacttgcttatgagagagagaccgacactaagatcgatgagctggtcgaccgtcgtcgcatgcataatgtgggcctgacctggagcctcttgagctgttgcagatctaacgactataggctctcgtcgaactagggaagaaatttaggttgactagcgagaaacgggaaaatcgatcgatgagctcagaagatcccaaggtgtaagtccagacaacgcttagtactacagaaaaggctttcaaagtcggcgaggcacgaatcctgactgtgttgtttttactgctacttgcgcctgccggctcccgtcccgcggcaatcgttaagctacgatatggtgacatccgcgtatgtctgcacgagatccgaataaaggcccacacaaagttggttgctctcaatatgtcgtctccgccgttgtaaaaactggcgttatccattgccggatagaagagccgctaactaccaaagtgcttgaggcaaggcgaccacctgctccagaggaggtccagacacaagactcggcaactgagcagatggagaggctgaggcaatcggtcatcatcagtcacgtgggcgagagactcacaaggtgcttcatctgtgttggtaaagcgcttacgttggcctcaaacggcccgaacctgagtttgctttgtcgaagctattcagatacatttatggcagcaaggcatttaaaatcccatctagctagctaaactagatgccaatgaaaggacatcttgtcctgtttgcgtgccagaggtctggctgaagaataaaatgcatctacaaaaccatggagaactcattcacggactcaagacatctgaacataccgggtttgtcatgctacggaagcattagggaggcagttcactcggatagcaggtactcgcaagccttgttcaaaggatgttctgcactgtcttcaattagctagggctcccttctgacggtagcatttccaggatagatgaattagtgctattcttattactgagtgcgcggtgtatttgctactgataattgttaaacaggc

SEQ ID NO: 39658 - DNA, 408 bp, Muscodor strobelii
  misc_feature: SGI cDNA ID NO. 573806
  misc_feature: Elevated expression when VOC is produced
  misc_feature: Encodes the peptide sequence at SEQ ID NO 39659
atggagaaagctctcggtcggcatactcaaatcgatctgttgggctatgggagcaaggcgccttttgttacgccgctcacccgcgctgagaaggtcggccgtaccgaaataggcccgcctcctaaaagattattgaagcgacccttcccaagagacgataataaaacatcgtccgagaagacaaccaacatcgaaaactcgtccgcacttctgaggagacaatggggggctccgcaagagcgatacaatatgttgtaccgcgtggaatttgccgggcccgccacttttgcggtgcagaagacgcgaccattcgcttgtgtcgtcatcaagagcttcccgctgaagaaggcagaagaggtgctctactggtgccgacgcgttaggcacagcaacatcatcacggcgctg

SEQ ID NO: 39659 - protein, 136 aa, Muscodor strobelii
  misc_feature: SGI Peptide ID NO. 573806
  misc_feature (7)..(136): NCBI GI: 156050909 Blast Desc: SS1G_08042 [Sclerotinia sclerotiorum 1980] gi|154692442|gb|EDN92180.1| SS1G_08042 [Sclerotinia sclerotiorum 1980]
  misc_feature (64)..(135): NCBI GI: 154280170 Blast Desc: [Ajellomyces capsulatus NAm1] gi|150412841|gb|EDN08228.1| [Ajellomyces capsulatus NAm1]
  misc_feature: Useful for introducing or modulating the production of volatile compounds
MEKALGRHTQIDLLGYGSKAPFVTPLTRAEKVGRTEIGPPPKRLLKRPFPRDDNKTSSEKTTNIENSSALLRRQWGAPQERYNMLYRVEFAGPATFAVQKTRPFACVVIKSFPLKKAEEVLYWCRRVRHSNIITAL

SEQ ID NO: 39660 - DNA, 452 bp, Muscodor strobelii
  misc_feature: SGI EST ID NO. CUFF.95587.0
  misc_feature: Variant of the nucleotide sequence at SEQ ID NO 39658
gcacagcttccgcaaaattatcatcataactgtggtatgtataccatggagaaagctctcggtcggcatactcaaatcgatctgttgggctatgggagcaaggcgccttttgttacgccgctcacccgcgctgagaaggtcggccgtaccgaaataggcccgcctcctaaaagattattgaagcgacccttcccaagagacgataataaaacatcgtccgagaagacaaccaacatcgaaaactcgtccgcacttctgaggagacaatggggggctccgcaagagcgatacaatatgttgtaccgcgtggaatttgccgggcccgccacttttgcggtgcagaagacgcgaccattcgcttgtgtcgtcatcaagagcttcccgctgaagaaggcagaagaggtgctctactggtgccgacgcgttaggcacagcaacatcatcacggcgct

SEQ ID NO: 39661 - DNA, 1656 bp, Muscodor strobelii
  misc_feature: SGI cDNA ID NO. 573807
  misc_feature: Encodes the peptide sequence at SEQ ID NO 39662
atggcgacccagcggaacgttctcagccatgctggcgagagaaagttcgagacgcctccgccgcacgagtacgagccagaacgagcggactcgatcgagctgggaaagccagatggcacacatcgaaagctcaagccgcgtcacattcaactaataggtatcggcggcactattggcaccatgttgtatgtgtcaattggccaacctttgacacaaggtggtcccgcgagtctattcatcgcattcactttgtggtgttcagttatcctcggtgtcaccttttgcttcgctgagatggtcacttatttgccgctgtcgtcgcctttcatccgatttgcaggacgctacgttgatccagcttttggttttgcagcagggtggaatttcttcgtcttcgaagctgtgcttgtcccatacgaaataaccgcgtcgaatctggttatccattattggagtgacgtcgtgccggctggtgctattatcgccattgatgtattatacgcattgatcaatctgctcgcggtgaaatggtacggcgagtctgagttctgggccgccctgggcaaggtcattcttatcgtcggccttctcatattcacgttcatagtctcggttggtgggaatccaaagcacgaccactttggctttcgttattggtacgatccaggggctttcaacgaatactacacaactggttctctcggcaagtttcagggatttctgcagtgcctgattttcgcctctctggctgtcgccggtccagattatgtctcaatggcagcaggcgaagcagagaatccccgcggtgttctgcctaaggctttcaattccgtattctaccgtttgaccacattctttgtgctcggatcacttgccgttggcatcctagttccttataacgataccgatctactcaatgcttacaagctgggcttaccaggtgccgctgcttcaccttatgttgtcgctatgggtcatttgggtataccgatcttaccccacatcgccaacgcccttatcttaaccgcctcgttctctgcgggaaacagttacgtgtattgcgcgtcaagatcactgtacggtttagcactcgaagggaaggctccgaaacttctcacgcgatgcaatagacggggtgtcccgatttactgcgtgctacttgtgctacttatcgcccttttatcatttctgcaagttagcgagggtgcctccgtggttctgaaatgggttgtcagtttggttacggcttcgcaactcatcaactacgctgtagtcactgcaacctatctctgttggaatcgcgctatgaaagctcaaggaattaaccggaagacgttgccttacaggggattccttcagccctatgcagcatattatgcgttcggcatgtgcttcctcttcatcttcatccaaggttatggtgtctttctgccaggcaaatggaatgttcccacatttctattctcgtacacttctgtcttcgcattcccattactctacttcggatggaagatctggcacggtacgaagatataccctccatcgaaggtcgacttggtgcaggatctcgaagatatcgaagactacacgcggagctacgtgcctacgccccctaaaaatttggttgataaatggttcaacaagctctttgattag

SEQ ID NO: 39662 - protein, 551 aa, Muscodor strobelii
  misc_feature: SGI Peptide ID NO. 573807
  misc_feature (48)..(516): Pfam Id: PF00324 Pfam Desc: Amino acid permease
  misc_feature (48)..(506): Pfam Id: PF00324 Pfam Desc: Amino acid permease
  misc_feature (12)..(550): NCBI GI: 256726393 Blast Desc: NECHADRAFT_79565 [Nectria haematococca mpVI 77-13-4]
  misc_feature (38)..(550): NCBI GI: 164429180 Blast Desc: NCU05198 [Neurospora crassa OR74A] gi|40882268|emb|CAF06092.1| carnitine transport protein [Neurospora crassa] gi|157072971|gb|EAA32961.2| NCU05198 crassa
  misc_feature (12)..(550): NCBI GI: 169607993 Blast Desc: SNOG_07062 [Phaeosphaeria nodorum SN15] gi|160701533|gb|EAT85713.2| SNOG_07062 [Phaeosphaeria nodorum SN15]
  misc_feature (11)..(538): NCBI GI: 116194506 Blast Desc: CHGG_03851 [Chaetomium globosum CBS 148.51] gi|88179764|gb|EAQ87232.1| CHGG_03851 [Chaetomium globosum CBS 148.51]
  misc_feature (38)..(539): NCBI GI: 119501274 Blast Desc: general amino acid permease (Agp2), [Neosartorya fischeri NRRL 181] gi|119415559|gb|EAW25497.1| general amino acid permease (Agp2), [Neosartorya fischeri NRRL 181]
  misc_feature (18)..(551): NCBI GI: 156030571 Blast Desc: SS1G_14381 [Sclerotinia sclerotiorum 1980] gi|154700772|gb|EDO00511.1| SS1G_14381 [Sclerotinia sclerotiorum 1980]
  misc_feature (17)..(540): NCBI GI: 169773979 Blast Desc: [Aspergillus oryzae RIB40] gi|83769319|dbj|BAE59456.1| protein product [Aspergillus oryzae]
  misc_feature (17)..(544): NCBI GI: 238492012 Blast Desc: general amino acid permease (Agp2), [Aspergillus flavus NRRL3357] gi|220697656|gb|EED53997.1| general amino acid permease (Agp2), [Aspergillus flavus NRRL3357]
  misc_feature (3)..(550): NCBI GI: 145256502 Blast Desc: An04g00530 [Aspergillus niger] gi|134058320|emb|CAK38509.1| protein product [Aspergillus niger]
  misc_feature (34)..(539): NCBI GI: 159124886 Blast Desc: general amino acid permease (Agp2), [Aspergillus fumigatus A1163]
MATQRNVLSHAGERKFETPPPHEYEPERADSIELGKPDGTHRKLKPRHIQLIGIGGTIGTMLYVSIGQPLTQGGPASLFIAFTLWCSVILGVTFCFAEMVTYLPLSSPFIRFAGRYVDPAFGFAAGWNFFVFEAVLVPYEITASNLVIHYWSDVVPAGAIIAIDVLYALINLLAVKWYGESEFWAALGKVILIVGLLIFTFIVSVGGNPKHDHFGFRYWYDPGAFNEYYTTGSLGKFQGFLQCLIFASLAVAGPDYVSMAAGEAENPRGVLPKAFNSVFYRLTTFFVLGSLAVGILVPYNDTDLLNAYKLGLPGAAASPYVVAMGHLGIPILPHIANALILTASFSAGNSYVYCASRSLYGLALEGKAPKLLTRCNRRGVPIYCVLLVLLIALLSFLQVSEGASVVLKWVVSLVTASQLINYAVVTATYLCWNRAMKAQGINRKTLPYRGFLQPYAAYYAFGMCFLFIFIQGYGVFLPGKWNVPTFLFSYTSVFAFPLLYFGWKIWHGTKIYPPSKVDLVQDLEDIEDYTRSYVPTPPKNLVDKWFNKLFD

SEQ ID NO: 39663 - DNA, 2717 bp, Muscodor strobelii
  misc_feature: SGI EST ID NO. CUFF.95606.0
  misc_feature: Variant of the nucleotide sequence at SEQ ID NO 39661
cgcgagtgcttgtactcgccgattcttccacttcctgcgacaagataacagaccgcacacttccatactgtgagactgtaacatcaagatcaccccgcaagttccaggtactagtcagacacttgcgagtactgtcttatgcctacaattgatggccgccggtcagagtcctgtgtcgccatgcaccggccccatggaacacatccggacttccacgagctctagcggttaacgtttaacaccgatggatcgggacctcggtcagcagaagatcaatctaggtcagcgtagcgctaggccctatgttccatcgattttactgtattccttgccggtaatagttgcgttcaccatgacgccgacccatacaagacgacagggcacaagaattatattccttatcctggagttacctgcataggcaataacacatgtcgttgaatacctatgttctcattcccgtccttttcgtaaatgtcttcaaagcacgcgacatacaagaactgtatcttctaggtgctgacttctagctcggccatgttcatccattgtcctgcattttgaacgtcttcaagccaatacaccaaacagcatcttgatcgttcacaaattcgaagatttagatcgatgcagatatagagcttcctgaacaattaggctatttacttccattccgtgcgagtcgctaacgattcgagatctcgcggcctgtgtctgtgtctcacgtcacttacaacagggaattaagcttgcacgtatgacgcaagatcagtgaacagtcacacgtcagaggggaatcaagtctgggcatgtcgcctgcacgataatcatcttgttaacgacatttaatatagcgaaccgctgagacttggacgctggatgaacgttctcaaagatggcgacccagcggaacgttctcagccatgctggcgagagaaagttcgagacgcctccgccgcacgagtacgagccagaacgagcggactcgatcgagctgggaaagccagatggcacacatcgaaagctcaagccgcgtcacattcaactaataggtatcggcggcactattggcaccatgttgtatgtgtcaattggccaacctttgacacaaggtggtcccgcgagtctattcatcgcattcactttgtggtgttcagttatcctcggtgtcaccttttgcttcgctgagatggtcacttatttgccgctgtcgtcgcctttcatccgatttgcaggacgctacgttgatccagcttttggttttgcagcagggtggaatttcttcgtcttcgaagctgtgcttgtcccatacgaaataaccgcgtcgaatctggttatccattattggagtgacgtcgtgccggctggtgctattatcgccattgatgtattatacgcattgatcaatctgctcgcggtgaaatggtacggcgagtctgagttctgggccgccctgggcaaggtcattcttatcgtcggccttctcatattcacgttcatagtctcggttggtgggaatccaaagcacgaccactttggctttcgttattggtacgatccaggggctttcaacgaatactacacaactggttctctcggcaagtttcagggatttctgcagtgcctgattttcgcctctctggctgtcgccggtccagattatgtctcaatggcagcaggcgaagcagagaatccccgcggtgttctgcctaaggctttcaattccgtattctaccgtttgaccacattctttgtgctcggatcacttgccgttggcatcctagttccttataacgataccgatctactcaatgcttacaagctgggcttaccaggtgccgctgcttcaccttatgttgtcgctatgggtcatttgggtataccgatcttaccccacatcgccaacgcccttatcttaaccgcctcgttctctgcgggaaacagttacgtgtattgcgcgtcaagatcactgtacggtttagcactcgaagggaaggctccgaaacttctcacgcgatgcaatagacggggtgtcccgatttactgcgtgctacttgtgctacttatcgcccttttatcatttctgcaagttagcgagggtgcctccgtggttctgaaatgggttgtcagtttggttacggcttcgcaactcatcaactacgctgtagtcactgcaacctatctctgttggaatcgcgctatgaaagctcaaggaattaaccggaagacgttgccttacaggggattccttcagccctatgcagcatattatgcgttcggcatgtgcttcctcttcatcttcatccaaggttatggtgtctttctgccaggcaaatggaatgttcccacatttctattctcgtacacttctgtcttcgcattcccattactctacttcggatggaagatctggcacggtacgaagatataccctccatcgaaggtcgacttggtgcaggatctcgaagatatcgaagactacacgcggagctacgtgcctacgccccctaaaaatttggttgataaatggttcaacaagctctttgattagactattttatgcacgataggactgcccgtgcgacatggagaagctgtgcgcgatgatttaagactagaccaagcatctatcgcatttgcatatgtttagcgaaacgtcagcatagcaatcagatatacccgatatagaattgagttatacagccttgaacaatcag

SEQ ID NO: 39664 - DNA, 1059 bp, Muscodor strobelii
  misc_feature: SGI cDNA ID NO. 573809
  misc_feature: Encodes the peptide sequence at SEQ ID NO 39665
atgaagaacatcgcatctatcatcgcgttagttgggtcttctcaagctgcgctgcgtttcggatgctcgactttgagtatccaacgactcgaccctctcgtcgagcccggaagcgccccgtcgtctcatctccatcagatcgtcggcggaaatgctttcaacgcttcgatgcggcccgaggacgggaatattggtgataaagctacatgcacgacctgtacattctccgaagatttctctaattactggacggccgtcatgttcttcaaacatacgaacggatcttacaagcgcgtgccgataatggagaatgatgcgcttcccgcgggtatcaacgggggcatgaccatttactacacgcagcaagacttcagttctaatggaaaccagaagatcaccgctttccctcccggcttccgaatgaccgctggcaaagtcacctccacaacgaagtatagcaaaggtctcaagttcgtgtgccttcaaaacaaagacacgcgattccctgagctagattccttccccaccgggaaatgcacgggtggcatcatgactgtccaccatttcccggcatgctgggatggaaagaatctcgatagtcctgatcatcagtctcacatgtacaacaccgtcaacgatgcattcgcagtctccggggcatgtccggcttcccaccctgttcgtgttccacaggttgcgtacgaaacactgtgggacacaactcagttcaacagcatgtggccagctagtggacagccctttgtcctaagctacggcgataaccagggtttcggaacgcatgcggactacatgttcggttggaaaggagacgcgctacaacgtgcaatggactccggctgtatgtttaatgcatgcgagaacgggagaccgctcaaatcgcatgcacctgcagaaatgaacgcgtgtacggttaagagcacagtcgacgagaatattgatggctgtaagttggatccacccttcacattgtccccttcggagctaatcagttggattgaagggcttccagagcttccgggaatgaaaacagcaatgtag

SEQ ID NO: 39665 - protein, 352 aa, Muscodor strobelii
  misc_feature: SGI Peptide ID NO. 573809
  misc_feature (31)..(274): Pfam Id: PF09362 Pfam Desc: Domain of function (DUF1996)
  misc_feature (1)..(321): NCBI GI: 116178994 Blast Desc: conserved [Chaetomium globosum CBS 148.51] gi|88184422|gb|EAQ91890.1| conserved [Chaetomium globosum CBS 148.51]
  misc_feature (1)..(323): NCBI GI: 164425163 Blast Desc: NCU11317 [Neurospora crassa OR74A] gi|157070815|gb|EAA33351.2| conserved [Neurospora crassa OR74A]
  misc_feature (6)..(351): NCBI GI: 171680783 Blast Desc: protein product [Podospora anserina] gi|27764287|emb|CAD60567.1| protein product [Podospora anserina] gi|170940019|emb|CAP65245.1| protein product [Podospora anserina]
  misc_feature (19)..(352): NCBI GI: 39975065 Blast Desc: MGG_00321 [Magnaporthe grisea 70-15] gi|145018793|gb|EDK03072.1| MGG_00321 [Magnaporthe grisea 70-15]
  misc_feature (4)..(319): NCBI GI: 169868148 Blast Desc: CC1G_10434 [Coprinopsis cinerea okayama7#130] gi|116498252|gb|EAU81147.1| CC1G_10434 [Coprinopsis cinerea okayama7#130]
  misc_feature (18)..(321): NCBI GI: 169596100 Blast Desc: SNOG_00801 [Phaeosphaeria nodorum SN15] gi|111071176|gb|EAT92296.1| SNOG_00801 [Phaeosphaeria nodorum SN15]
  misc_feature (19)..(321): NCBI GI: 189202536 Blast Desc: conserved [Pyrenophora tritici-repentis Pt-1C-BFP] gi|187984703|gb|EDU50191.1| conserved [Pyrenophora tritici-repentis Pt-1C-BFP]
  misc_feature (1)..(326): NCBI GI: 171685460 Blast Desc: protein product [Podospora anserina] gi|170942691|emb|CAP68344.1| protein product [Podospora anserina]
  misc_feature (3)..(326): NCBI GI: 171678167 Blast Desc: protein product [Podospora anserina] gi|170937153|emb|CAP61810.1| protein product [Podospora anserina]
  misc_feature (1)..(324): NCBI GI: 171680022 Blast Desc: protein product [Podospora anserina] gi|170939637|emb|CAP64864.1| protein product [Podospora anserina]
MKNIASIIALVGSSQAALRFGCSTLSIQRLDPLVEPGSAPSSHLHQIVGGNAFNASMRPEDGNIGDKATCTTCTFSEDFSNYWTAVMFFKHTNGSYKRVPIMENDALPAGINGGMTIYYTQQDFSSNGNQKITAFPPGFRMTAGKVTSTTKYSKGLKFVCLQNKDTRFPELDSFPTGKCTGGIMTVHHFPACWDGKNLDSPDHQSHMYNTVNDAFAVSGACPASHPVRVPQVAYETLWDTTQFNSMWPASGQPFVLSYGDNQGFGTHADYMFGWKGDALQRAMDSGCMFNACENGRPLKSHAPAEMNACTVKSTVDENIDGCKLDPPFTLSPSELISWIEGLPELPGMKTAM

SEQ ID NO: 39666 - DNA, 1782 bp, Muscodor strobelii
  misc_feature: SGI cDNA ID NO. 573810
  misc_feature: Encodes the peptide sequence at SEQ ID NO 39667
atggggtcgttttggaataaagtttgtttgttgagcgtcgcctcaactttcatcccctcgtccatctgtcagtcaccgccagttccgtcagttgtcaccataatcgactcggctgtgtatcctggtgccagtatatccttcaaagagacacagatatgtgagactacgaaggatattaaatcctacagtggctttgtcaacctcccgccaaatccatctgaaggccgcaaccacgaacttcacacatggttttggttcttcgaggcgcgtaacgatcctcagaatgcaccgctctctttatggcttcaggggggccctggagctccgtcaactccagctgcagtcggcgaacatgggccatgcagagttctccccaattctctagatactgagctcaatgcgtggtcctggaacgatcgagtgaacatgttatatatcgaccagcccgtccagacagggttctcctatgacacactgatcaacggcacgataaacgaggttctatcaccattcaccgttcagcccggtgacaagacaaacaccactgttctggctggagtcttctcttcgcaagatactgagctggcgccaagtagcacatcctctgttgctcctgctatgtggcactttatgcaagtgtggatgcaagagtttcccggctacacgtcagtcgatgggaaatatagcatttgggctgagtcgtacggtggccactatgcaccgacgtttgcggattacttcaacaagcagaatgagcgcattgagattggtgaactttccgctgagaccgcgacacctttacatctcgagactctcggacttgtcaacgcttgcatcgacatagatactcaaatgcctttgtatcctatcatggcgaacaacaacacttatggcattgagcttttgaacagcaccacatacgctgcttcgcttgctgcgatcccacaatgtctcaatctgactagcatatgccgatctatgtccgctgagcttgacctagagacttggggaaacaatactgcggtcaataacgcttgccttcaggcatacgacttttgcttctctaacgttgcatttgaggatacgaccgggcaattagaatctggggtttatcactttgatatcgcttctcctgcgctcacatccttccctcctaaattcgctgccggatacttgaacaacgcagatatccagcaagctcttggagtaccactcaactttaccggcaactctgctgccgtatcacagcaatttttcttagcaggtgatttcgttaagggtgataatctcgccatcctcggccggcttctcgaccagggggtgaagattgccttgatgtatggcgatcgcgactaccaatgcaactggtttggtggcgaggctatcagcttggctatcgaatcaaagttatcaaagaagtttgagagtgcgggttatgccgatatcgagactaacgcatcgtacgtcggagtcccttactatcaacctgaaactgcctatcagatcttcaatcgtgccatgtccggccttgacgtcgcaactggcacgacaccaactgacaaaagtggcagctgcggatattcttcgcgtggcaacgctaccgcgctgactgccgatgacgtgcctgtgatattcgaggagagcgtacagtgctatttctgggacatgctcgagacttgcacaccagcacagaaggctctgttcaacaatgggagtgccatcacagaggactttgtcctggttgggtacaaacttgctgatgaaaccgagacatatttctaa

SEQ ID NO: 39667 - protein, 593 aa, Muscodor strobelii
  misc_feature: SGI Peptide ID NO. 573810
  misc_feature (47)..(509): Pfam Id: PF00450 Pfam Desc: Serine carboxypeptidase
  misc_feature (47)..(461): Pfam Id: PF00450 Pfam Desc: Serine carboxypeptidase
  misc_feature (49)..(593): NCBI GI: 116197314 Blast Desc: CHGG_05255 [Chaetomium globosum CBS 148.51] gi|88181168|gb|EAQ88636.1| CHGG_05255 [Chaetomium globosum CBS 148.51]
  misc_feature (26)..(581): NCBI GI: 240109125 Blast Desc: serine carboxypeptidase, [Coccidioides posadasii C735 delta SOWgp]
  misc_feature (26)..(582): NCBI GI: 115438046 Blast Desc: ATEG_09343 [Aspergillus terreus NIH2624] gi|114188780|gb|EAU30480.1| ATEG_09343 [Aspergillus terreus NIH2624]
  misc_feature (26)..(581): NCBI GI: 169777249 Blast Desc: [Aspergillus oryzae RIB40] gi|238494378|ref|XP_002378425.1| carboxypeptidase S1, [Aspergillus flavus NRRL3357] gi|83771827|dbj|BAE61957.1| protein
  misc_feature (26)..(581): NCBI GI: 259487624 Blast Desc: TPA: carboxypeptidase S1, (AFU_orthologue; AFUA_5G07330) [Aspergillus nidulans FGSC A4]
  misc_feature (26)..(581): NCBI GI: 67523563 Blast Desc: AN2237.2 [Aspergillus nidulans FGSC A4] gi|40744766|gb|EAA63922.1| AN2237.2 [Aspergillus nidulans FGSC A4]
  misc_feature (26)..(582): NCBI GI: 255956095 Blast Desc: Pc21g18050 [Penicillium chrysogenum Wisconsin 54-1255] gi|211590511|emb|CAP96702.1| Pc21g18050 [Penicillium chrysogenum Wisconsin 54-1255]
  misc_feature (24)..(581): NCBI GI: 259495738 Blast Desc: SCPB_NANOT RecName: Full=Carboxypeptidase S1 homolog B; AltName: Full=Serine carboxypeptidase B; Short=SPCB; Flags: Precursor gi|238840344|gb|EEQ30006.1| carboxypeptidase S1 canis
  misc_feature (4)..(581): NCBI GI: 121712894 Blast Desc: carboxypeptidase S1, [Aspergillus clavatus NRRL 1] gi|119402211|gb|EAW12632.1| carboxypeptidase S1, [Aspergillus clavatus NRRL 1]
  misc_feature (9)..(581): NCBI GI: 74588400 Blast Desc: SCPB_TRIRU RecName: Full=Carboxypeptidase S1 homolog B; AltName: Full=Serine carboxypeptidase B; Short=SPCB; Flags: Precursor gi|45758826|gb|AAS76666.1| carboxypeptidase S1 rubrum]
  misc_feature (24)..(581): SWISSPROT Homolog: EC 3.4.16.6 Carboxypeptidase D
MGSFWNKVCLLSVASTFIPSSICQSPPVPSVVTIIDSAVYPGASISFKETQICETTKDIKSYSGFVNLPPNPSEGRNHELHTWFWFFEARNDPQNAPLSLWLQGGPGAPSTPAAVGEHGPCRVLPNSLDTELNAWSWNDRVNMLYIDQPVQTGFSYDTLINGTINEVLSPFTVQPGDKTNTTVLAGVFSSQDTELAPSSTSSVAPAMWHFMQVWMQEFPGYTSVDGKYSIWAESYGGHYAPTFADYFNKQNERIEIGELSAETATPLHLETLGLVNACIDIDTQMPLYPIMANNNTYGIELLNSTTYAASLAAIPQCLNLTSICRSMSAELDLETWGNNTAVNNACLQAYDFCFSNVAFEDTTGQLESGVYHFDIASPALTSFPPKFAAGYLNNADIQQALGVPLNFTGNSAAVSQQFFLAGDFVKGDNLAILGRLLDQGVKIALMYGDRDYQCNWFGGEAISLAIESKLSKKFESAGYADIETNASYVGVPYYQPETAYQIFNRAMSGLDVATGTTPTDKSGSCGYSSRGNATALTADDVPVIFEESVQCYFWDMLETCTPAQKALFNNGSAITEDFVLVGYKLADETETYF

SEQ ID NO: 39668 - DNA, 1567 bp, Muscodor strobelii
  misc_feature: SGI EST ID NO. CUFF.95641.0
  misc_feature: Variant of the nucleotide sequence at SEQ ID NO 39666
gtttgaaatgacttgaaggctaggaaggcgcagcacagatccgacaactctgaggagcccgtttccgatttcattcaagactgcaatagataaaagcgcactcgccatgcgggaattcaatcgattgaacggccaacgagccttgatcaaccctcgtagttttcaccataagtactgacgatttgcaccaatcactacctcctacccaatccacgacttaacttggggtttgacatcgaaagaccgagacattgttgagcaccaattgcatcacgatggggtcgttttggaataaagtttgtttgttgagcgtcgcctcaactttcatcccctcgtccatctgtcagtcaccgccagttccgtcagttgtcaccataatcgactcggctgtgtatcctggtgccagtatatccttcaaagagacacagatatgtgagactacgaaggatattaaatcctacagtggctttgtcaacctcccgccaaatccatctgaaggccgcaaccacgaacttcacacatggttttggttcttcgaggcgcgtaacgatcctcagaatgcaccgctctctttatggcttcaggggggccctggagctccgtcaactccagctgcagtcggcgaacatgggccatgcagagttctccccaattctctagatactgagctcaatgcgtggtcctggaacgatcgagtgaacatgttatatatcgaccagcccgtccagacagggttctcctatgacacactgatcaacggcacgataaacgaggttctatcaccattcaccgttcagcccggtgacaagacaaacaccactgttctggctggagtcttctcttcgcaagatactgagctggcgccaagtagcacatcctctgttgctcctgctatgtggcactttatgcaagtgtggatgcaagagtttcccggctacacgtcagtcgatgggaaatatagcatttgggctgagtcgtacggtggccactatgcaccgacgtttgcggattacttcaacaagcagaatgagcgcattgagattggtgaactttccgctgagaccgcgacacctttacatctcgagactctcggacttgtcaacgcttgcatcgacatagatactcaaatgcctttgtatcctatcatggcgaacaacaacacttatggcattgagcttttgaacagcaccacatacgctgcttcgcttgctgcgatcccacaatgtctcaatctgactagcatatgccgatctatgtccgctgagcttgacctagagacttggggaaacaatactgcggtcaataacgcttgccttcaggcatacgacttttgcttctctaacgttgcatttgaggatacgaccgggcaattagaatctggggtttatcactttgatatcgcttctcctgcgctcacatccttccctcctaaattcgctgccggatacttgaacaacgcagatatccagcaagctcttggagtaccactcaactttaccggcaactctgctgccgtatcacagcaatttttcttagcaggtgatttcgttaagggtgataatctcgc

SEQ ID NO: 39669 - DNA, 963 bp, Muscodor strobelii
  misc_feature: SGI cDNA ID NO. 573811
  misc_feature: Encodes the peptide sequence at SEQ ID NO 39670
atggcttctgaaaagatagagttcttgaattcgatcaagcctgaggatttcagctcagacgaacgctatgccgcgaaggaggcagcaagaaagctgcttgcgcggctagagacgcccttcgagctcctttggcacatggaatttgctctacctcctctgcataccggcctccagatgggtcttgatcttggcttgtggtcaaaatgggccgaactggatagacagacgccaaatgctgctaagacacttgatgatttaatcaagctaaacgtgcacgctcttagaaccgagttttcgctcaaccttagtgtaaatctgtccaagttcctcggcgaaattgactaccaggaacccctggaccttaagaaatatgacaaccaccgtaacctccgtggccaagatttcttcgagtattgcaaggtaaatccgcaggcgggcagtagctttatcggcatgatgacagcaatacgcgattataaaatggactggactgcggtttacgacactcagcgcatcacgaaggaagccgacttgagccggccactctttgtcgacattggtggcgctcacgggctcgattcgcagcgcctgctggaccacaacccagttcttcgaaacccggacttggcgggcacggccaaagtaatactgcaggaccttccggaggtactaacgactcatgcacaagagaaacttgatcctcggattgagcgtatgccatatgacttctttacgcctcaacctgttcagggggcacgcgcgtatttcttccacgccgtaccgcacgattggccggatgccgagtgccgcaagatcttcagcgaggtccgtaaggcaatgacccctggatactctaagctacttgtatatggagatggtgttgccggctcgcgacgcgatgcctttgatgacgacgctcgacgtgcagctaatggtttgcttgtcgggcatggagagaactga

SEQ ID NO: 39670 - protein, 320 aa, Muscodor strobelii
  misc_feature: SGI Peptide ID NO. 573811
  misc_feature (93)..(315): Pfam Id: PF00891 Pfam Desc: O-methyltransferase
  misc_feature (214)..(290): Pfam Id: PF00891 Pfam Desc: O-methyltransferase
  misc_feature (6)..(290): NCBI GI: 169622053 Blast Desc: SNOG_14240 [Phaeosphaeria nodorum SN15] gi|160704683|gb|EAT78477.2| SNOG_14240 [Phaeosphaeria nodorum SN15]
  misc_feature (99)..(290): NCBI GI: 169771385 Blast Desc: [Aspergillus oryzae RIB40] gi|83768021|dbj|BAE58160.1| protein product [Aspergillus oryzae]
  misc_feature (99)..(290): NCBI GI: 238486064 Blast Desc: O-methyltransferase, [Aspergillus flavus NRRL3357] gi|220699149|gb|EED55488.1| O-methyltransferase, [Aspergillus flavus NRRL3357]
  misc_feature (2)..(290): NCBI GI: 115385781 Blast Desc: conserved [Aspergillus terreus NIH2624] gi|114187884|gb|EAU29584.1| conserved [Aspergillus terreus NIH2624]
  misc_feature (2)..(290): NCBI GI: 145245013 Blast Desc: An11g08080 [Aspergillus niger] gi|134079469|emb|CAK46001.1| protein product [Aspergillus niger]
  misc_feature (6)..(290): NCBI GI: 46122829 Blast Desc: FG05792.1 [Gibberella zeae PH-1]
  misc_feature (4)..(290): NCBI GI: 238503662 Blast Desc: O-methyltransferase, [Aspergillus flavus NRRL3357] gi|220690534|gb|EED46883.1| O-methyltransferase, [Aspergillus flavus NRRL3357]
  misc_feature (2)..(290): NCBI GI: 46111923 Blast Desc: FG02843.1 [Gibberella zeae PH-1]
  misc_feature (37)..(290): NCBI GI: 169607252 Blast Desc: SNOG_06684 [Phaeosphaeria nodorum SN15] gi|111065395|gb|EAT86515.1| SNOG_06684 [Phaeosphaeria nodorum SN15]
  misc_feature (21)..(289): NCBI GI: 255943319 Blast Desc: Pc18g06010 [Penicillium chrysogenum Wisconsin 54-1255] gi|211587161|emb|CAP94825.1| Pc18g06010 [Penicillium chrysogenum Wisconsin 54-1255]
MASEKIEFLNSIKPEDFSSDERYAAKEAARKLLARLETPFELLWHMEFALPPLHTGLQMGLDLGLWSKWAELDRQTPNAAKTLDDLIKLNVHALRTEFSLNLSVNLSKFLGEIDYQEPLDLKKYDNHRNLRGQDFFEYCKVNPQAGSSFIGMMTAIRDYKMDWTAVYDTQRITKEADLSRPLFVDIGGAHGLDSQRLLDHNPVLRNPDLAGTAKVILQDLPEVLTTHAQEKLDPRIERMPYDFFTPQPVQGARAYFFHAVPHDWPDAECRKIFSEVRKAMTPGYSKLLVYGDGVAGSRRDAFDDDARRAANGLLVGHGEN

SEQ ID NO: 39671 - DNA, 1044 bp, Muscodor strobelii
  misc_feature: SGI cDNA ID NO. 573812
  misc_feature: Encodes the peptide sequence at SEQ ID NO 39672
atggcattgccgcctactgaaatcgaaggcattgtcgaatacgttgtcggctccctcattttcttagcaagatgggtgatccgatggagattggttggtatcagtgcttgggccatggacgactggctctcggtgatcgcttggattgtgtctacagtttatttcatcttggttgaggaacttggtcagtacggcgcaccagttggtttcacccaggagatgcgcgaggccctgaccccagaactgcggcaatcgttcgagtatggttcgaaaatcttggtcgcatgcttcggtttccttatcgccttacagtggacccttaaggccaccttgattacattcttcatgcgcttgacgcgccagacaaggctatacaaatacacgctcgtcatagcaggaatctctgtggccgctttcgttgctgctattatcacttggcctacgcactgcctgccaattgagcgtgcctggcaaattttacccgatccaggattcgagtgctcgctcaatatttctacgaacatcgtcatgtgcatcgggagcgcttttgtcgacttacttctcctcgctataccagttatgctggtcaaagacatcagtattacgtttatccaaaaggctctcatcgttttcgtcttgtcaacaggtgtatttgcgatgggcatcacaattgctcgcggcattctatctgtccagcccgggtccgaacgtgttgcacagaattcagcttggggcaaccgcgagattctagtgacaatctttgctgtcaacgtaccgatcgtacatgttctcttcaagagggaaacttggaagaagatgtggggtatcgaatccagaacctatgttaagaccggtgatagggatggcgacaccggtatgtccagccgaggggcaaagggatccaagtcaagcaagatggaaatctacaagatgaccagtattcgcatggacagccgtgagagcgagaccaaattggttcatggcaatggtgtccctggtgcatatcttgcgtccaacacgacccaccacggttcaaacgtctag

SEQ ID NO: 39672 - protein, 347 aa, Muscodor strobelii
  misc_feature: SGI Peptide ID NO. 573812
  misc_feature (6)..(341): NCBI GI: 169622055 Blast Desc: SNOG_14241 [Phaeosphaeria nodorum SN15] gi|160704684|gb|EAT78478.2| SNOG_14241 [Phaeosphaeria nodorum SN15]
  misc_feature (5)..(347): NCBI GI: 119473853 Blast Desc: NFIA_002560 [Neosartorya fischeri NRRL 181] gi|119406955|gb|EAW16905.1| conserved [Neosartorya fischeri NRRL 181]
  misc_feature (5)..(346): NCBI GI: 159128387 Blast Desc: conserved [Aspergillus fumigatus A1163]
  misc_feature (5)..(330): NCBI GI: 121712256 Blast Desc: conserved [Aspergillus clavatus NRRL 1] gi|119401895|gb|EAW12317.1| conserved [Aspergillus clavatus NRRL 1]
  misc_feature (5)..(330): NCBI GI: 238508395 Blast Desc: conserved [Aspergillus flavus NRRL3357] gi|220688911|gb|EED45263.1| conserved [Aspergillus flavus NRRL3357]
  misc_feature (5)..(346): NCBI GI: 67903122 Blast Desc: AN8548.2 [Aspergillus nidulans FGSC A4] gi|40747817|gb|EAA66973.1| AN8548.2 [Aspergillus nidulans FGSC A4] gi|259484501|tpe|CBF80776.1| TPA: [Aspergillus nidulans FGSC
  misc_feature (5)..(327): NCBI GI: 115436988 Blast Desc: conserved [Aspergillus terreus NIH2624] gi|114188512|gb|EAU30212.1| conserved [Aspergillus terreus NIH2624]
  misc_feature (1)..(333): NCBI GI: 189210419 Blast Desc: conserved [Pyrenophora tritici-repentis Pt-1C-BFP] gi|187977634|gb|EDU44260.1| conserved [Pyrenophora tritici-repentis Pt-1C-BFP]
  misc_feature (5)..(270): NCBI GI: 256733547 Blast Desc: NECHADRAFT_5929 [Nectria haematococca mpVI 77-13-4]
  misc_feature (1)..(340): NCBI GI: 238841725 Blast Desc: conserved [Microsporum canis CBS 113480]
MALPPTEIEGIVEYVVGSLIFLARWVIRWRLVGISAWAMDDWLSVIAWIVSTVYFILVEELGQYGAPVGFTQEMREALTPELRQSFEYGSKILVACFGFLIALQWTLKATLITFFMRLTRQTRLYKYTLVIAGISVAAFVAAIITWPTHCLPIERAWQILPDPGFECSLNISTNIVMCIGSAFVDLLLLAIPVMLVKDISITFIQKALIVFVLSTGVFAMGITIARGILSVQPGSERVAQNSAWGNREILVTIFAVNVPIVHVLFKRETWKKMWGIESRTYVKTGDRDGDTGMSSRGAKGSKSSKMEIYKMTSIRMDSRESETKLVHGNGVPGAYLASNTTHHGSNV

SEQ ID NO: 39673 - DNA, 348 bp, Muscodor strobelii
  misc_feature: SGI cDNA ID NO. 573813
  misc_feature: Encodes the peptide sequence at SEQ ID NO 39674
atgcacgctacgttcctgtctctgctctttgccgccggcctggtaacagcacaaaataccgtggctatcattgtggagtctgcaacaggctgcgcgacgaaaccttacgtaaacaacacgatatcagtccctaatatcggtagccagccctactacaacaccgatgggaacttggaccgtgtcacggctttatatgagaccgaatcaccatcgctctgcatccctgagaatgccgataactcaaacacagtcccagacaacgagcaatactatctttatctcggcacgcctatgcacatcagcacgaccggcgtatacatcgaccacatcaggtgcggcctggagtaa

SEQ ID NO: 39674 - protein, 115 aa, Muscodor strobelii
  misc_feature: SGI Peptide ID NO. 573813
MHATFLSLLFAAGLVTAQNTVAIIVESATGCATKPYVNNTISVPNIGSQPYYNTDGNLDRVTALYETESPSLCIPENADNSNTVPDNEQYYLYLGTPMHISTTGVYIDHIRCGLE

SEQ ID NO: 39675 - DNA, 1142 bp, Muscodor strobelii
  misc_feature: SGI EST ID NO. CUFF.95683.0
  misc_feature: Variant of the nucleotide sequence at SEQ ID NO 39673
cacaaccactctagatcagtctatcccgataattgctaggtgctcgtcatgagttccttttttcctctcagttccgttgactgggctggtgacgtgatatgggctgttttggggggcgttaactcgcgagaaatagccggccaagtcttacgaacgcgccgtatcgaattgtttgtaagcatagtaccgcaagcccggcaaccgctgcactaaacttccctttcatgacagcggcgagatctcagcttggcgctcgtgcccaccaaatttagatagtccatggcgaagatgagccccggtcctctgtgccgccccggaaatataaagagctgaaccttcacgacctcagagtggtctattgagcacacgcacacgttcaaacacgtaaaccaacaaagctgccggaccctccttcgtactcttagactataatcagtcaaaatgcacgctacgttcctgtctctgctctttgccgccggcctggtaacagcacaaaataccgtggctatcattgtggagtctgcaacaggctgcgcgacgaaaccttacgtaaacaacacgatatcagtccctaatatcggtagccagccctactacaacaccgatgggaacttggaccgtgtcacggctttatatgagaccgaatcaccatcgctctgcatccctgagaatgccgataactcaaacacagtcccagacaacgagcaatactatctttatctcggcacgcctatgcacatcagcacgaccggcgtatacatcgaccacatcaggtgcggcctggagtaaactgtccgaaggctgaattaatggattgtccgttcgatatggccagagggtaattcccgccacatcgacagcggagattattgtaacccctataataggctggaatacatgagcgcgacagcatggcccattatactagaaatgggcatatttaattaatagtgtacgggggccacacgagatgagacgcggatactccactcctttcataattataatcgaaagatcgatctcacgctattgcctcatagatagacttttacttggtgaggttgtttccacgattgaagtggtggccaattttcccatatcagtaatagtgacgagctaccgagactaaaagtcagatggtg

SEQ ID NO: 39676 - DNA, 369 bp, Muscodor strobelii
  misc_feature: SGI cDNA ID NO. 573814
  misc_feature: Encodes the peptide sequence at SEQ ID NO 39677
atgcgtttcacagctgcattcacactctccgcgctcgtcgctatctccatggctgcatcggtgcccgacggcaaattgagctcagttgacgccgaagcggcgggaacctgtcccgttgcgaacaacggcgggtgcggcaagaagaagtcctgctattgccgcgatgagagcaccgacttttcctatgcgccttgctaccctaactgtggatgccccgataactggacaggctggtgttgggggaagcattgggatattgctcgcaagatccctctgttgaatattctgtactatagggctcggccaggacggagcagcaactttaacccatcggtcgctcgtttgcctttaagttttgtctttttgtaa

SEQ ID NO: 39677 - protein, 122 aa, Muscodor strobelii
  misc_feature: SGI Peptide ID NO. 573814
MRFTAAFTLSALVAISMAASVPDGKLSSVDAEAAGTCPVANNGGCGKKKSCYCRDESTDFSYAPCYPNCGCPDNWTGWCWGKHWDIARKIPLLNILYYRARPGRSSNFNPSVARLPLSFVFL

SEQ ID NO: 39678 - DNA, 1215 bp, Muscodor strobelii
  misc_feature: SGI cDNA ID NO. 573815
  misc_feature: Encodes the peptide sequence at SEQ ID NO 39679
atgacggtcgtcacaaacgactttgtccctatcaagccctacgttacggacgccgtcactcttgctcctggacaacggtcagatgttatagtatatgcaaccggagcacccactgactctatgtggctccgggcgtataagtctcctgactgctcccctagtagggacggttcatacaacgccattgctgccattttctacgaagacgctgatcgtgaggtgcctccctgcacacagcctggtccgaatgctttcaacgactactgtggcaatgaccctatatccatgactgtcccgcagtatcctattgccgtccttaaccccgatgtcacagagattctgcccatcgagctgcaaaacaatggcactgccaatttgtggtacatggcgaatagaacgttccgtgttgatttcaatacgcctcaattactgagtgcaaagaatggagatctggacttcccatggattcaaaatgtccataattacggcaacaacaagtctattcggttcatcgtcgagaacaccggcgatatcccccaccctatgcacattcatggacacaatttctgggttctacaagagggcgtatgcggcgacaataacaccgtattccctggaggcatggggcccccaggtttcatgatgagcccaggtcagatgtctgagcagcttggcggcggcgcgagtgatgaggatgatgaagaagacgagggaacaagcgacggccagagctacaccggtggccaagactacagcgagagcacgaggattcgccagaagctgcgcaaacggcgtgagtcgcatgacagtcgtgatattagggtatccacagtcggcgattatcttgaaaggagacaaacggatagcaatggggtagtcaacacaagtgattcatcgggtatctacattggagactacggcacatgctgggatgggtcgattgtgaacccgggcaaccctcaacgacgagatgttcaaatgctactgcccaagaactatattgtcatccaatgggaacaaattaatcccggcatctggccgtttcactgtcacattgcttggcatttggctgcgggcatgaattggatgatattagagcgcccagacgacattatgaaagatatggaaattcccgactacatggcccagacatgtacagactggcaagcttggtcaagccagaatcttgttgaccaaattggcgacggcatctga

SEQ ID NO: 39679 - protein, 404 aa, Muscodor strobelii
  misc_feature: SGI Peptide ID NO. 573815
  misc_feature (135)..(370): Pfam Id: PF07731 Pfam Desc: Multicopper oxidase
  misc_feature (1)..(70): Pfam Id: PF00394 Pfam Desc: Multicopper oxidase
  misc_feature (316)..(370): Pfam Id: PF07731 Pfam Desc: Multicopper oxidase
  misc_feature (135)..(195): Pfam Id: PF07731 Pfam Desc: Multicopper oxidase
  misc_feature (1)..(195): NCBI GI: 63146072 Blast Desc: laccase I [Hortaea acidophila]
  misc_feature (1)..(195): NCBI GI: 116192909 Blast Desc: CHGG_06172 [Chaetomium globosum CBS 148.51] gi|88182085|gb|EAQ89553.1| CHGG_06172 [Chaetomium globosum CBS 148.51]
  misc_feature (1)..(195): NCBI GI: 189188196 Blast Desc: laccase-1 precursor [Pyrenophora tritici-repentis Pt-1C-BFP] gi|187972043|gb|EDU39542.1| laccase-1 precursor [Pyrenophora tritici-repentis Pt-1C-BFP]
  misc_feature (1)..(195): NCBI GI: 156056931 Blast Desc: SS1G_04196 [Sclerotinia sclerotiorum 1980] gi|154701982|gb|EDO01721.1| SS1G_04196 [Sclerotinia sclerotiorum 1980]
  misc_feature (1)..(195): NCBI GI: 145254736 Blast Desc: An18g02690 [Aspergillus niger] gi|134084312|emb|CAK48652.1| protein product [Aspergillus niger]
  misc_feature (1)..(195): NCBI GI: 171684087 Blast Desc: protein product [Podospora anserina] gi|170942004|emb|CAP67656.1| protein product [Podospora anserina]
  misc_feature (1)..(195): NCBI GI: 212533161 Blast Desc: multicopper oxidase, [Penicillium marneffei ATCC 18224] gi|210072101|gb|EEA26190.1| multicopper oxidase, [Penicillium marneffei ATCC 18224]
  misc_feature (1)..(196): NCBI GI: 154321175 Blast Desc: BC1G_01462 [Botryotinia fuckeliana B05.10] gi|150852000|gb|EDN27192.1| BC1G_01462 [Botryotinia fuckeliana B05.10]
  misc_feature (1)..(195): NCBI GI: 154323698 Blast Desc: BC1G_00248 [Botryotinia fuckeliana B05.10] gi|150842477|gb|EDN17670.1| BC1G_00248 [Botryotinia fuckeliana B05.10]
  misc_feature (1)..(195): NCBI GI: 256731892 Blast Desc: NECHADRAFT_80719 [Nectria haematococca mpVI 77-13-4]
MTVVTNDFVPIKPYVTDAVTLAPGQRSDVIVYATGAPTDSMWLRAYKSPDCSPSRDGSYNAIAAIFYEDADREVPPCTQPGPNAFNDYCGNDPISMTVPQYPIAVLNPDVTEILPIELQNNGTANLWYMANRTFRVDFNTPQLLSAKNGDLDFPWIQNVHNYGNNKSIRFIVENTGDIPHPMHIHGHNFWVLQEGVCGDNNTVFPGGMGPPGFMMSPGQMSEQLGGGASDEDDEEDEGTSDGQSYTGGQDYSESTRIRQKLRKRRESHDSRDIRVSTVGDYLERRQTDSNGVVNTSDSSGIYIGDYGTCWDGSIVNPGNPQRRDVQMLLPKNYIVIQWEQINPGIWPFHCHIAWHLAAGMNWMILERPDDIMKDMEIPDYMAQTCTDWQAWSSQNLVDQIGDGI

SEQ ID NO: 39680 - DNA, 945 bp, Muscodor strobelii
  misc_feature: SGI EST ID NO. CUFF.95714.0
  misc_feature: Variant of the nucleotide sequence at SEQ ID NO 39678
gtgattcatcgggtatctacattggagactacggcacatgctgggatgggtcgattgtgaacccgggcaaccctcaacgacgagatgttcaaatgctactgcccaagaactatattgtcatccaatgggaacaaattaatcccggcatctggccgtttcactgtaagtacattcatgtcgctatcctcattttctgactatgactaagacaatgcgataggtcacattgcttggcatttggctgcgggcatgaattggatgatattagagcgcccagacgacattatgaaagatatggaaattcccgactacatggcccagacatgtacagactggcaagcttggtcaagccagaatcttgttgaccaaattggcgacggcatctgagagtcatgcgagtagccatttcttcgctctgttaagctgaaccaaagatgcggcgagcccttttccaattactttaatatcacgtactgttaagaaacgtatgcttgcagctttcaatttattattgtcaattatatactgcattttcttcatgatttatttgcgtacttaatgtcatgcatcgctatacggaaccggcgggaggttttgaaatacttctggatatcatgtatttcaaaagtatggtagtacaaacgcttctaaatttagcacgaagcgaaaatcgaagcgaaatttcatgaatgacaacttgaatccagccgtgacggattgtctcaacgaggatacaagtgtttgtcctcaattatgaagtccaaagtacattgcggggtgtgggaggtgacttacaagtgtgttatgttgctaattgctaggttcccccaaaccccacgacttgaatttaagtatgacatcattcttttctcgtatagtctaacgaaagcttgatgcagctttaaaattgtaaattcggaacagtcgatctttgctttgattacg

SEQ ID NO: 39681 - DNA, 849 bp, Muscodor strobelii
  misc_feature: SGI cDNA ID NO. 573816
  misc_feature: Encodes the peptide sequence at SEQ ID NO 39682
atggctcagctcgtatggcttattactggttgctcatcaggatttggcgagcacttcgttcaccagatccggtctcgaggagatcttgtgattgcgacggcgcgcaacgttgagaagattcggcaccttgaacaacccggcgtcgcacttttagaactcgacgttacaagtacgcaaacggttttgaatgggattattttaaaagctattggaatatacggaagagtcgatgttcttgtcaacaatgccgcctatatcgccacaggctcatgggaagacgtcggctatgaaatgcttctagcgcaattcgaaacgaacgttttcggcgtgtataagctcacacgcgccattttgccgcatcttcgcgagcgtcgcactggtacattagtcttcattggctcgcgctcagggtggtatggcgatccatttgtaggaccgtacacaggttcaaagttcgcgcttgatgggcttgttgagtcacttgatcgcgagatatcatcatttggtatcaagactctgcttatcgaacctggtcgctttcgcacaaagctcctatctgctggtaatctccaagcggtgcaatcaaatattcccgactacgcggaagcatcgaaggcctttattgccggcctggcgagcgaggacatgaatcagcccggcgatcccgagaaaggcatgcggcttatcgtggatctcgtgcgtggagagggagtagctgaaggaaaggatgtgccttttagactacccatgggaacggattgttatgaaacgatgcgatcgaagtgcgaggagacgcttgcgatgctagacgattggaatgatttgatcagaagcacggattatcagtag

SEQ ID NO: 39682 - protein, 282 aa, Muscodor strobelii
  misc_feature: SGI Peptide ID NO. 573816
  misc_feature (4)..(166): Pfam Id: PF00106 Pfam Desc: short chain dehydrogenase
  misc_feature (6)..(150): Pfam Id: PF01370 Pfam Desc: NAD dependent epimerase/dehydratase family
  misc_feature (1)..(281): NCBI GI: 256731864 Blast Desc: NECHADRAFT_41660 [Nectria haematococca mpVI 77-13-4]
  misc_feature (4)..(282): NCBI GI: 164423032 Blast Desc: NCU09353 [Neurospora crassa OR74A] gi|157069920|gb|EAA29696.2| [Neurospora crassa OR74A]
  misc_feature (1)..(280): NCBI GI: 119474277 Blast Desc: short-chain oxidoreductase, [Neosartorya fischeri NRRL 181] gi|119407167|gb|EAW17117.1| short-chain oxidoreductase, [Neosartorya fischeri NRRL 181]
  misc_feature (1)..(282): NCBI GI: 121711988 Blast Desc: short-chain oxidoreductase, [Aspergillus clavatus NRRL 1] gi|119401761|gb|EAW12183.1| short-chain oxidoreductase, [Aspergillus clavatus NRRL 1]
  misc_feature (1)..(280): NCBI GI: 261194551 Blast Desc: short-chain oxidoreductase [Ajellomyces dermatitidis SLH14081] gi|239588218|gb|EEQ70861.1| short-chain oxidoreductase [Ajellomyces dermatitidis SLH14081] gi|239613502|gb|EEQ90489.1|
  misc_feature (4)..(280): NCBI GI: 67904782 Blast Desc: AN9378.2 [Aspergillus nidulans FGSC A4] gi|40747289|gb|EAA66445.1| AN9378.2 [Aspergillus nidulans FGSC A4] gi|259488220|tpe|CBF87502.1| TPA: conserved [Aspergillus FGSC
  misc_feature (5)..(280): NCBI GI: 115389138 Blast Desc: conserved [Aspergillus terreus NIH2624] gi|114194470|gb|EAU36170.1| conserved [Aspergillus terreus NIH2624]
  misc_feature (4)..(282): NCBI GI: 46115898 Blast Desc: FG03791.1 [Gibberella zeae PH-1]
  misc_feature (3)..(280): NCBI GI: 256722682 Blast Desc: NECHADRAFT_53052 [Nectria haematococca mpVI 77-13-4]
  misc_feature (1)..(280): NCBI GI: 242801488 Blast Desc: hydroxybutyrate dehydrogenase, [Talaromyces stipitatus ATCC 10500] gi|218717123|gb|EED16544.1| hydroxybutyrate dehydrogenase, [Talaromyces stipitatus ATCC 10500]
  misc_feature (1)..(185): SWISSPROT Homolog: EC 1.1.1.62 Estradiol 17-beta-dehydrogenase
MAQLVWLITGCSSGFGEHFVHQIRSRGDLVIATARNVEKIRHLEQPGVALLELDVTSTQTVLNGIILKAIGIYGRVDVLVNNAAYIATGSWEDVGYEMLLAQFETNVFGVYKLTRAILPHLRERRTGTLVFIGSRSGWYGDPFVGPYTGSKFALDGLVESLDREISSFGIKTLLIEPGRFRTKLLSAGNLQAVQSNIPDYAEASKAFIAGLASEDMNQPGDPEKGMRLIVDLVRGEGVAEGKDVPFRLPMGTDCYETMRSKCEETLAMLDDWNDLIRSTDYQ

SEQ ID NO: 39683 - DNA, 683 bp, Muscodor strobelii
  misc_feature: SGI EST ID NO. CUFF.95723.0
  misc_feature: Variant of the nucleotide sequence at SEQ ID NO 39681
cacaggctcatgggaagacgtcggctatgaaatgcttctagcgcaattcgaaacgaacgttttcggcgtgtataagctcacacgcgccattttgccgcatcttcgcgagcgtcgcactggtacattagtcttcattggctcgcgctcagggtggtatggcgatccatttgtaggaccgtacacaggttcaaagttcgcgcttgatggtatgctgcaccactgtctttcatgacaattcttctgttgctgatgttaagcagggcttgttgagtcacttgatcgcgagatatcatcatttggtatcaagactctgcttatcgaacctggtcgctttcgcacaaagctcctatctgctggtaatctccaagcggtgcaatcaaatattcccgactacgcggaagcatcgaaggcctttattgccggcctggcgagcgaggacatgaatcagcccggcgatcccgagaaaggcatgcggcttatcgtggatctcgtgcgtggagagggagtagctgaaggaaaggatgtgccttttagactacccatgggaacggattgttatgaaacgatgcgatcgaagtgcgaggagacgcttgcgatgctagacgattggaatgatttgatcagaagcacggattatcagtagatgagtagatcgaatcaacaagagtacgatggtacctccc

SEQ ID NO: 39684 - DNA, 1479 bp, Muscodor strobelii
  misc_feature: SGI cDNA ID NO. 573817
  misc_feature: Encodes the peptide sequence at SEQ ID NO 39685
atggcgtcgacggcgataacgaacagcgcctcggcggccgaggtgttcgatattgtcataattggcgctggcatatctggtatcaattgttcatatcgccttcaagagcaactccctggcaagactttcacggttctcgaaggtcgcgatgattttggcggcacgtgggatctgttcaaatatcctggcatccgttcagactctgatctttatacctttggtttcgcatgggagccgtggccatatgagacacctattgccgaagggcctctcatcaaagaatacatgagagattgcatcaagaagcacaatctcggtcaatacttccgctatcagcataaggtccagaatgcaagctgggatcggcagactgaacagtggacggtgaaagtagaacatgacggtcaaacaaaatatttcaagggccattggcttatcatggggactgggtattacgactatcacgagcctttccagacagcaatcacaggcatagacagcttcaaaggaaagataatacacccgcagtattggcctactgactacgaccacagtggcaagaaaatggctgtgattgggagcggagcgacagcaatcacgttgatccctgcattagcaaagacagccctcatggtgaccatgatacagagaagtccgacctggattgtgaacgcagtcaacggcagtcccaaaacagactggctcattcgtaacttaccaggaaaatggccagggttgttcaaacactttacatacatgctgactgggtatttgactaccgtgttctgcaaatacttcccgcttcatgcccggggcttgttgatgagagaagcaaaaaagcaactcccaaagaggctcccattctcgcctcactttgaaccatcttacaatccgtgggagcagcggttgtgtctgtgtcctgatggagacttcttcacatgcttgcatcagtcaaacacgaatgtcgtgactggcaagattgagacggtcacggaggacggtgttcaaatgcaagacggcaccaaagttgaagcagatgtgatcgtgaccgcgactggcatcaagatgcgactgggtggtcacatagacctgattgtaaacggcgagaagatggagttcaaagacagactgctatggaatggggccatggttcaagatattccgaacatgatgtacatgctcgggtacacgaatcattcatggacgctcggctctgacgacacagcgaatgttcttattcgcctcataaaatacatgaaatcgaaagacgcgacgacagctgtgccccgcgcaccagcagatggtgtaaagggctatcagaaaatgtggcaattgagctcgacgtacagtcgagaatctgcgtcggaattgcctagatacgggaatgttggcccttggcgaccgagaacacgcgcccctcaagattggctgcatgctcgatatggtgacattgtcactgggttgcattttagcgcctga

SEQ ID NO: 39685 - protein, 492 aa, Muscodor strobelii
  misc_feature: SGI Peptide ID NO. 573817
  misc_feature (17)..(54): Pfam Id: PF01266 Pfam Desc: FAD dependent oxidoreductase
  misc_feature (16)..(490): NCBI GI: 255939438 Blast Desc: Pc16g00690 [Penicillium chrysogenum Wisconsin 54-1255] gi|211585111|emb|CAP92739.1| Pc16g00690 [Penicillium chrysogenum Wisconsin 54-1255]
  misc_feature (16)..(490): NCBI GI: 70982843 Blast Desc: flavin-binding monooxygenase [Aspergillus fumigatus Af293] gi|66844574|gb|EAL84911.1| flavin-binding monooxygenase, [Aspergillus fumigatus Af293]
  misc_feature (16)..(489): NCBI GI: 121714827 Blast Desc: flavin-binding monooxygenase, [Aspergillus clavatus NRRL 1] gi|119403179|gb|EAW13597.1| flavin-binding monooxygenase, [Aspergillus clavatus NRRL 1]
  misc_feature (16)..(490): NCBI GI: 159123833 Blast Desc: flavin-binding monooxygenase, [Aspergillus fumigatus A1163]
  misc_feature (8)..(488): NCBI GI: 226287919 Blast Desc: monoxygenase [Paracoccidioides brasiliensis Pb18]
  misc_feature (8)..(488): NCBI GI: 225678917 Blast Desc: monooxygenase [Paracoccidioides brasiliensis Pb03]
  misc_feature (16)..(490): NCBI GI: 119484002 Blast Desc: flavin-binding monooxygenase, [Neosartorya fischeri NRRL 181] gi|119410060|gb|EAW20007.1| flavin-binding monooxygenase, [Neosartorya fischeri NRRL 181]
  misc_feature (15)..(492): NCBI GI: 256725013 Blast Desc: NECHADRAFT_34619 [Nectria haematococca mpVI 77-13-4]
  misc_feature (6)..(488): NCBI GI: 261187944 Blast Desc: flavin-binding monooxygenase [Ajellomyces dermatitidis SLH14081] gi|239593400|gb|EEQ75981.1| flavin-binding monooxygenase [Ajellomyces dermatitidis SLH14081]
  misc_feature (6)..(488): NCBI GI: 239614987 Blast Desc: flavin-binding monooxygenase [Ajellomyces dermatitidis ER-3]
  misc_feature (16)..(395): SWISSPROT Homolog: EC 1.14.13.84 4-hydroxyacetophenone monooxygenase
MASTAITNSASAAEVFDIVIIGAGISGINCSYRLQEQLPGKTFTVLEGRDDFGGTWDLFKYPGIRSDSDLYTFGFAWEPWPYETPIAEGPLIKEYMRDCIKKHNLGQYFRYQHKVQNASWDRQTEQWTVKVEHDGQTKYFKGHWLIMGTGYYDYHEPFQTAITGIDSFKGKIIHPQYWPTDYDHSGKKMAVIGSGATAITLIPALAKTALMVTMIQRSPTWIVNAVNGSPKTDWLIRNLPGKWPGLFKHFTYMLTGYLTTVFCKYFPLHARGLLMREAKKQLPKRLPFSPHFEPSYNPWEQRLCLCPDGDFFTCLHQSNTNVVTGKIETVTEDGVQMQDGTKVEADVIVTATGIKMRLGGHIDLIVNGEKMEFKDRLLWNGAMVQDIPNMMYMLGYTNHSWTLGSDDTANVLIRLIKYMKSKDATTAVPRAPADGVKGYQKMWQLSSTYSRESASELPRYGNVGPWRPRTRAPQDWLHARYGDIVTGLHFSA

SEQ ID NO: 39686 - DNA, 2146 bp, Muscodor strobelii
  misc_feature: SGI EST ID NO. CUFF.95726.0
  misc_feature: Variant of the nucleotide sequence at SEQ ID NO 39684
cttggaccgagtttctaatcaagagaacacctcaaaccaatgcaatagagactcatccttctatttcatttgaatcgatcactgttttatcacgaactggacattgatagagaattttgaaagtaacatacgcgcccgttctcagctatttgtgcgtcactaagtatggcgtcgacggcgataacgaacagcgcctcggcggccgaggtgttcgatattgtcataattggcgctggcatatctggtatcaattgttcatatcgccttcaagagcaactccctggcaagactttcacggttctcgaaggtcgcgatgattttggcggcacgtgggatctgttcaaatatcctggcatccgttcagactctgatctttatacctttggtttcgcatgggagccgtggccatatgagacacctattgccgaagggcctctcatcaaagaatacatgagagattgcatcaagaagcacaatctcggtcaatacttccgctatcagcataaggtccagaatgcaagctgggatcggcagactgaacagtggacggtgaaagtagaacatgacggtcaaacaaaatatttcaagggccattggcttatcatggggactgggtattacgactatcacgagcctttccagacagcaatcacaggcatagacagcttcaaaggaaagataatacacccgcagtattggcctactgactacgaccacagtggcaagaaaatggctgtgattgggagcggagcgacagcaatcacgttgatccctgcattagcaaagacagccctcatggtgaccatgatacagagaagtccgacctggattgtgaacgcagtcaacggcagtcccaaaacagactggctcattcgtaacttaccaggaaaatggccagggttgttcaaacactttacatacatgctgactgggtatttgactaccgtgttctgcaaatacttcccgcttcatgcccggggcttgttgatgagagaagcaaaaaagcaactcccaaagaggctcccattctcgcctcactttgaaccatcttacaatccgtgggagcagcggttgtgtctgtgtcctgatggagacttcttcacatgcttgcatcagtcaaacacgaatgtcgtgactggcaagattgagacggtcacggaggacggtgttcaaatgcaagacggcaccaaagttgaagcagatgtgatcgtgaccgcgactggcatcaagatgcgactgggtggtcacatagacctgattgtaaacggcgagaagatggagttcaaagacagactgctatggaatggggccatggttcaagatattccgaacatgatgtacatgctcgggtacacgaatcattcatggacgctcggctctgacgacacagcgaatgttcttattcgcctcataaaatacatgaaatcgaaagacgcgacgacagctgtgccccgcgcaccagcagatggtgtaaagggctatcagaaaatgtggcaattgagctcgacgtacagtcgagaatctgcgtcggaattgcctagatacgggaatgttggcccttggcgaccgagaacacgcgcccctcaagattggctgcatgctcgatatggtgacattgtcactgggttgcattttagcgcctgatgcgctggacgatgcgctgaaggtttctcatcaccgccgcgacgagcgaacacgcagagcggaccaaaacggccttcgattgcggtgaaatgaaaatttttagtgtcgcagtcgttgcttacattcattaaagctatatacaggactccaaatggtcgttggccaattggggggcggaaaatgactggcaggtggattcagatagtgagcggacacagggcgggatgcagcggacattatagcaaaggccgctctcatacccaataacctccatacatggagccaacgttgacaagcaaactggtaatacaacgaagagtatgatgaagagatcatttgagaatgagtcatgcggcgcggttcgctagcattttggacgatggaggaagacagattgatataaatatcctgtcgctcacaacggacgaaacatcatgtataacaggagtccagccttgatcactgaactctgaataccatcttacaattgcaattgaattca

SEQ ID NO: 39687 - DNA, 1176 bp, Muscodor strobelii
  misc_feature: SGI cDNA ID NO. 573818
  misc_feature: Encodes the peptide sequence at SEQ ID NO 39688
atgaccgacaagccagcgaccgtgacccttgtcgcgcaatgtctgtgccaagctcacaaattcacggcagaagtatcgcagtcatcactccctctgaatgcagtcttctgccactgtgacacttgtcgccatacgacgggcgccctatacagctctgatgtgccatggccaggtgattacgacaccattcgagagtcttcccttcggagatatgccttgttcgattcgatcgcactgcttttctgtgggacatgcagcagccccatgttctttgaaaagaaagacgatgagcagaagacactgacatatggtgctttcatcggcatgctgaataatgtgaacgttgaatctctcgtgcggatcgcggatcacatatgtttaggagacacggttgatggaggggcttttccttggcttcgcaacttgaacgctgacaccgatggaccggattcatggatcggacgtagaggcgagagtaagaaactctatgacgactggccaggagtcagtgatctaccagatgatgcaatggacattcccgttgacgaaatcccattgagatgtgcatgcaagggagtgaacttggtgtttcacaagccaatgtcagaatacgcatctaagcctcgctctgaactaccttggttcattgatcctgtcaccaacaagtcatccggtggttttgacgtttgcgactcatgtcgtttgtcctcaggagccgatatattccattggacctttgcatctttcaaacacatgtcattcccggacaagggagctcagcccgccttccccaagtctagcattgagctccacgcagcggtctcagcaaaagaccgagatcctcgctggggtactctgacctcttacgaaagctcaccagatgtgcgacgatacttctgcagccagtgctccgcatgtgtcttctatgctgcggacgatcggtcggaaatggttgatattgcgatcggattgttagaatcgccggatgggtcgagagccgagggcctagtttcgtggaattttggggggagttgcgtatggaggcaagacgttactggtggatggagagaaacgcttattgaaagggttgagcgtacagcagatagctggagagaacgacgcaaatacccgaagaactggagacggatattaaaagaacaagcagtagcagaatga

SEQ ID NO: 39688 - protein, 391 aa, Muscodor strobelii
  misc_feature: SGI Peptide ID NO. 573818
  misc_feature (35)..(123): Pfam Id: PF04828 Pfam Desc: Glutathione-dependent formaldehyde-activating enzyme
  misc_feature (7)..(391): NCBI GI: 46113459 Blast Desc: FG02931.1 [Gibberella zeae PH-1]
  misc_feature (3)..(388): NCBI GI: 256722235 Blast Desc: NECHADRAFT_72769 [Nectria haematococca mpVI 77-13-4]
  misc_feature (1)..(391): NCBI GI: 171692499 Blast Desc: protein product [Podospora anserina] gi|170946198|emb|CAP72999.1| protein product [Podospora anserina]
  misc_feature (183)..(388): NCBI GI: 116198479 Blast Desc: CHGG_07395 [Chaetomium globosum CBS 148.51] gi|88178674|gb|EAQ86142.1| CHGG_07395 [Chaetomium globosum CBS 148.51]
  misc_feature (8)..(368): NCBI GI: 145615792 Blast Desc: MGG_14310 [Magnaporthe grisea 70-15] gi|145022936|gb|EDK06631.1| MGG_14310 [Magnaporthe grisea 70-15]
  misc_feature (4)..(382): NCBI GI: 261356938 Blast Desc: DUF636 domain-containing protein [Verticillium albo-atrum VaMs.102]
  misc_feature (6)..(381): NCBI GI: 255944141 Blast Desc: Pc20g02840 [Penicillium chrysogenum Wisconsin 54-1255] gi|211587573|emb|CAP85613.1| Pc20g02840 [Penicillium chrysogenum Wisconsin 54-1255]
  misc_feature (6)..(339): NCBI GI: 71001832 Blast Desc: DUF636 domain protein [Aspergillus fumigatus Af293] gi|66853235|gb|EAL93559.1| DUF636 domain protein [Aspergillus fumigatus Af293] gi|159129656|gb|EDP54770.1| DUF636 domain A1163]
  misc_feature (9)..(339): NCBI GI: 255936183 Blast Desc: Pc13g06850 [Penicillium chrysogenum Wisconsin 54-1255] gi|211583738|emb|CAP91754.1| Pc13g06850 [Penicillium chrysogenum Wisconsin 54-1255]
  misc_feature (9)..(374): NCBI GI: 115388687 Blast Desc: conserved [Aspergillus terreus NIH2624] gi|114195933|gb|EAU37633.1| conserved [Aspergillus terreus NIH2624]
MTDKPATVTLVAQCLCQAHKFTAEVSQSSLPLNAVFCHCDTCRHTTGALYSSDVPWPGDYDTIRESSLRRYALFDSIALLFCGTCSSPMFFEKKDDEQKTLTYGAFIGMLNNVNVESLVRIADHICLGDTVDGGAFPWLRNLNADTDGPDSWIGRRGESKKLYDDWPGVSDLPDDAMDIPVDEIPLRCACKGVNLVFHKPMSEYASKPRSELPWFIDPVTNKSSGGFDVCDSCRLSSGADIFHWTFASFKHMSFPDKGAQPAFPKSSIELHAAVSAKDRDPRWGTLTSYESSPDVRRYFCSQCSACVFYAADDRSEMVDIAIGLLESPDGSRAEGLVSWNFGGSCVWRQDVTGGWRETLIERVERTADSWRERRKYPKNWRRILKEQAVAE

SEQ ID NO: 39689 - DNA, 1980 bp, Muscodor strobelii
  misc_feature: SGI EST ID NO. CUFF.95734.0
  misc_feature: Variant of the nucleotide sequence at SEQ ID NO 39687
tagggcgcatagtagccgcatgcttagactcttgctgcctttacgtgagatgaacacctgcagatgacgggtcggagtcgaagcgattggagttaccccagattcgcggatgagacgccaccgggagttttagtcccgctaaccaaatccattatgttccatagtcttgccggcatcaagaatcggttcgtccctaattattcataaaagtgatatactgtctgccatttactctttacttcaatctcagtcccagaacggtgacaagaatcacgcgacctgcattaataagagaggagtattgttgaccgatggcactccaatacccggtcgggtattacattgatggaaatgggaagcggggtctcacaagcgaacagctgaagccaagagaccaccacaaatatccctgtctcatcatcatggagctgaatgtgcgatactctacttgacctcatcggtggcacgagtctgcctgcagacgccaacgagagacacatttgcctcgttcttggtgctcattagccagtcgttgaagttccgagcatcgttgctgaccaaaaaagacgatgaccgacaagccagcgaccgtgacccttgtcgcgcaatgtctgtgccaagctcacaaattcacggcagaagtatcgcagtcatcactccctctgaatgcagtcttctgccactgtgacacttgtcgccatacgacgggcgccctatacagctctgatgtgccatggccaggtgattacgacaccattcgagagtcttcccttcggagatatgccttgttcgattcgatcgcactgcttttctgtgggacatgcagcagccccatgttctttgaaaagaaagacgatgagcagaagacactgacatatggtgctttcatcggcatgctgaataatgtgaacgttgaatctctcgtgcggatcgcggatcacatatgtttaggagacacggttgatggaggggcttttccttggcttcgcaacttgaacgctgacaccgatggaccggattcatggatcggacgtagaggcgagagtaagaaactctatgacgactggccaggagtcagtgatctaccagatgatgcaatggacattcccgttgacgaaatcccattgagatgtgcatgcaagggagtgaacttggtgtttcacaagccaatgtcagaatacgcatctaagcctcgctctgaactaccttggttcattgatcctgtcaccaacaagtcatccggtggttttgacgtttgcgactcatgtcgtttgtcctcaggagccgatatattccattggacctttgcatctttcaaacacatgtcattcccggacaagggagctcagcccgccttccccaagtctagcattgagctccacgcagcggtctcagcaaaagaccgagatcctcgctggggtactctgacctcttacgaaagctcaccagatgtgcgacgatacttctgcagccagtgctccgcatgtgtcttctatgctgcggacgatcggtcggaaatggttgatattgcgatcggattgttagaatcgccggatgggtcgagagccgagggcctagtttcgtggaattttggggggagttgcgtatggaggcaagacgttactggtggatggagagaaacgcttattgaaagggttgagcgtacagcagatagctggagagaacgacgcaaatacccgaagaactggagacggatattaaaagaacaagcagtagcagaatgagtttctccgaatgtgtgcttcggaaagcttgcatttgcggatgtcaacaacacttctcgcccaagagaacatgttaaagaacatcaacatagtggcagtggggagccagaaccgttgacaaggcatcccttacacttcagcgcactgttcttttataaaattctacggcttcaagtatcatactcgatgccaacttttgacagtcctctaatgaatatgccttattcggtttgtg

SEQ ID NO: 39690 - DNA, 1122 bp, Muscodor strobelii
  misc_feature: SGI cDNA ID NO. 573819
  misc_feature: Reduced expression when VOC is produced
  misc_feature: Encodes the peptide sequence at SEQ ID NO 39691
atgtcttcgagaacgagattaagcatggacgagctcaacgccatggctctggagcagttcattcacacacctgtcagccatgagatgatatcctacctggcacacgctgcttccaacgtcatccaatgcgacccgaacatgatgccgccgccacctcagtcccaggttcctactccacctcggacaccctcgcccagcgccattcgatgtgacgatagcagcttaccgacactggaggagttcattacgcagttggttgtttcgtcaaatgtacaggtacccactcttatgtcgacgctggtctatctcaccaagctcaaggcgcggcttcagcccatggcaaagggtctgcgatgcacgacccaccgcatcttcttggccgcgctcatcctctctgccaagtatctcaacgacagctcaccgaagaacaagcactgggccaactacagccacatcaactgcgagagctatagctttggattcagccgaaccgaagtgaatctaatggagaagcagctgctgtttctactggattgggagctgcgaattactgaggaggatctgtacagagagttggacctctttttgacgcccattcgcgacgacctccaggccaagtttgcccgccgcatggaacgcaagctgcgccaaagggagcaggaggaggccatgcgcttggccgcagctcggatgcctactccccctgcttctcgcggaaactctcggtctccctcgcgctaccccaaggagacgattcgcatggtccgcgacatgcattcggcttctccgcctcctggcctgacccaccattacagctcgtctgtcagcagttcaggcagttcatacgcctcttcgctgtcttcgcgccagcactcgcgttcttctacgcctctctctgatcctgagatcgcggatccttacgttgcagcttacggcgagtcttcgctctacgactcacctgttgagattgttctcgatatgcccgcccttgctcctatggccaagaacggataccgcggcaagactctgctcccttatgagatcagccccgaggagttgcccgctaagcgcgcccgcacaggccgaggcgtctgggatcgcatccgaggagtggtcgtctaa

SEQ ID NO: 39691 - protein, 373 aa, Muscodor strobelii
  misc_feature: SGI Peptide ID NO. 573819
  misc_feature (27)..(181): Pfam Id: PF08613 Pfam Desc: Cyclin
  misc_feature (28)..(182): Pfam Id: PF00134 Pfam Desc: Cyclin, N-terminal domain
  misc_feature (95)..(181): Pfam Id: PF08613 Pfam Desc: Cyclin
  misc_feature (114)..(182): Pfam Id: PF00134 Pfam Desc: Cyclin, N-terminal domain
  misc_feature (2)..(373): NCBI GI: 46128179 Blast Desc: FG08467.1 [Gibberella zeae PH-1]
  misc_feature (2)..(373): NCBI GI: 256733466 Blast Desc: [Nectria haematococca mpVI 77-13-4]
  misc_feature (3)..(222): NCBI GI: 85097208 Blast Desc: NCU04847 [Neurospora crassa OR74A] gi|28921896|gb|EAA31170.1| NCU04847 [Neurospora crassa OR74A]
  misc_feature (5)..(219): NCBI GI: 171682586 Blast Desc: protein product [Podospora anserina] gi|170941252|emb|CAP66902.1| protein product [Podospora anserina]
  misc_feature (9)..(348): NCBI GI: 261359381 Blast Desc: PHO85 cyclin-1 [Verticillium albo-atrum VaMs.102]
  misc_feature (13)..(238): NCBI GI: 154322935 Blast Desc: BC1G_00810 [Botryotinia fuckeliana B05.10] gi|150848144|gb|EDN23337.1| BC1G_00810 [Botryotinia fuckeliana B05.10]
  misc_feature (6)..(218): NCBI GI: 145613794 Blast Desc: MGG_01361 [Magnaporthe grisea 70-15] gi|145020815|gb|EDK04944.1| MGG_01361 [Magnaporthe grisea 70-15]
  misc_feature (13)..(238): NCBI GI: 156064631 Blast Desc: SS1G_00323 [Sclerotinia sclerotiorum 1980] gi|154691185|gb|EDN90923.1| SS1G_00323 [Sclerotinia sclerotiorum 1980]
  misc_feature (8)..(231): NCBI GI: 145228913 Blast Desc: An01g03330 [Aspergillus niger] gi|134054859|emb|CAK36873.1| protein product [Aspergillus niger]
  misc_feature (9)..(229): NCBI GI: 238486374 Blast Desc: cyclin (Pcl1), [Aspergillus flavus NRRL3357] gi|220699304|gb|EED55643.1| cyclin (Pcl1), [Aspergillus flavus NRRL3357]
  misc_feature: Useful for introducing or modulating the production of volatile compounds
MSSRTRLSMDELNAMALEQFIHTPVSHEMISYLAHAASNVIQCDPNMMPPPPQSQVPTPPRTPSPSAIRCDDSSLPTLEEFITQLVVSSNVQVPTLMSTLVYLTKLKARLQPMAKGLRCTTHRIFLAALILSAKYLNDSSPKNKHWANYSHINCESYSFGFSRTEVNLMEKQLLFLLDWELRITEEDLYRELDLFLTPIRDDLQAKFARRMERKLRQREQEEAMRLAAARMPTPPASRGNSRSPSRYPKETIRMVRDMHSASPPPGLTHHYSSSVSSSGSSYASSLSSRQHSRSSTPLSDPEIADPYVAAYGESSLYDSPVEIVLDMPALAPMAKNGYRGKTLLPYEISPEELPAKRARTGRGVWDRIRGVVV

SEQ ID NO: 39692 - DNA, 3867 bp, Muscodor strobelii
  misc_feature: SGI EST ID NO. CUFF.95764.0
  misc_feature: Variant of the nucleotide sequence at SEQ ID NO 39690
gcactattcattcaatattgacaccaatactgcaacgcggccccaacgcactatcaatcctctaatcaatccacatactctgcaagtcccttcttgacgaagatcgactacattcattcaactcaaccctcactgtcacaaaggttgacatcgtgcactccctaatagagtcatctgagaagaacttatattagacagcacaccccagcatgtcttctggttcattcattcagcacgcattagagctttaatacacccaagacaccattcggtcacactcgtcccacggttcgccgtctaacttggaactttctttgattgaagcaacatatcatttgcgaaagtgacgcagaataattcggtctcgtctcgtcaatcttttgtaatctttcttaatcgaacgcattctttatttgagatcttgctactcggtagattcgtcactcactgcgcctcgcactttcaactcggcataaacgccaaacgcattcgtcagtcttttcggcggtgcaaatccactatatacgtattcgtacacgataatcggcttccaagcaactatcgtcaacgcaaccgtctgtgcttacttaggcagcgatattttgtccaatattgccatcttgagcgctttgcaccttaccgctggcacgggaacatcatcggctcttcagcaactgtcatccgcacccacccctctagacgaatagggtaacatcgagaacatagagctgacccagttgactgaactgtcccaaactcgatatcgcacagttaattactagtacttggcgattgactttgtcttgcggaccgttgaccacgtcagccattctcaagcattgagctctcttgcgattaacgtgattgcctaatttcgcaatcgcactccgaaagcaacacggccatttccacttttcccggatctcaagccacatcgtgagtgtgctgaatcaaaagaagcatcattcaaccaccatcaatcaataattaacaccaactgcgcagtttagtcagacgacactaaactctgttccattccgcgagtcacgcagcactactcgggctcacaattccatacttctttcgcgctcttctagttcacggagagagcgagtaagaacacacatcgattccccatattcacaaatccagcacttcaagttcggcagcatacggggtgtgcctgctgtatttggatttttgcataactgaccggaatcaacgagagactctcagagcgaacggagcgttccctaccggccaagcccgaccccctgcattttcacggtacgcgggtacatcaggtgccaagcacgcagcgcaagccacttgtcaagcataccgtcggtttaagactcccagttagccacctccctggaagcaagacagacagtcttggaagagagccccctgacaggcccactcgcccacccacgtccacttcttcgcatccagcccagtcgaggcacttcgtgtcagctcccctcccagcgagcacacctcccctgtctcacccaagaccacccagccctctgaagtactccacccccggctccagcctacaagcccaccgcgagtacgcaattcggtacctacaattataggtgcatacatcgcctttcgcgaacactcgctctcataataaggaagcccgctcagcctcgacactcctcacgtcacggcttttccacacattgtttatttgataattcataaacaaatactcctgcctctgctttaactagcaccgcgccgcctgggttcactattgggctctattatgaccagacagttcgcctcgtgatacgtccacccgtcctttgtacctcacccaggcccgtcactccccatacgactaccacttatacatccacacacacacatcacttacacacacctcccctgtccgccaccaacaacctgaatctttgatatataccatccgcccttcccaccatcatcaacatcttccccggattttctcttctcattcctcaacatcgggacatagtcaccaaaccacaacgtcatcgttgctgtgtgagagtcgttcctgttaacatcaactcactccactcacacacactcaccacaactcgaccacttacacacaacccacatattcagcaacgatgtcttcgagaacgagattaagcatggacgagctcaacgccatggctctggagcagttcattcacacacctgtcagccatgagatgatatcctacctggcacacgctgcttccaacgtcatccaatgcgacccgaacatgatgccgccgccacctcagtcccaggttcctactccacctcggacaccctcgcccagcgccattcgatgtgacgatagcagcttaccgacactggaggagttcattacgcagttggttgtttcgtcaaatgtacaggtacccactcttatgtcgacgctggtctatctcaccaagctcaaggcgcggcttcagcccatggcaaagggtctgcgatgcacgacccaccgcatcttcttggccgcgctcatcctctctgccaagtatctcaacgacagctcaccgaagaacaagcactgggccaactacagccacatcaactgcgagagctatagctttggattcagccgaaccgaagtgaatctaatggagaagcagctgctgtttctactggattgggagctgcgaattactgaggaggatctgtacagagagttggacctctttttgacgcccattcgcgacgacctccaggccaagtttgcccgccgcatggaacgcaagctgcgccaaagggagcaggaggaggccatgcgcttggccgcagctcggatgcctactccccctgcttctcgcggaaactctcggtctccctcgcgctaccccaaggagacgattcgcatggtccgcgacatgcattcggcttctccgcctcctggcctgacccaccattacagctcgtctgtcagcagttcaggcagttcatacgcctcttcgctgtcttcgcgccagcactcgcgttcttctacgcctctctctgatcctgagatcgcggatccttacgttgcagcttacggcgagtcttcgctctacgactcacctgttgagattgttctcgatatgcccgcccttgctcctatggccaagaacggataccgcggcaagactctgctcccttatgagatcagccccgaggagttgcccgctaagcgcgcccgcacaggccgaggcgtctgggatcgcatccgaggagtggtcgtctaaatctcatcatcaccaatttctttcatttgttgtattcggctactatgcatacggaggaaacgcgtcacgacatgccggaaagattgatattttcagcatcattcatatatcaacatcgatcacgaatttcgttacagtactacaatttttttcatcgtcttgtcactagcatcggcagcgaggagttcaggcgaaacagaaatcatcccttgagagggcaaaagacttttcgcttctttgcttttttttcgggcttgcacacacaaagggatcgacgggtcgatcctcgcatcacatcatccctggcgaaacgtttttagagtcatactttctatacctataaagttcgatgatacctactaggaacggcaagaaagggaaggaaacaattaattcagaagacgaaactggatcgggactgggaacattgcatcgcacgggcttgggaattttcggtgttcagggatctgataataagtcttgttccgttgggaacaccgacgttgcatcggggatcggtgcatggattgataggatgggttcatcaggtagatagcattccgagcaagctcggttcaaccaatgtcacatttctatctacactctacaatac

SEQ ID NO: 39693 - DNA, 960 bp, Muscodor strobelii
  misc_feature: SGI cDNA ID NO. 573820
  misc_feature: Encodes the peptide sequence at SEQ ID NO 39694
atggagaactaccagaagctagagaagatcggtgaaggtacgtacggagtggtgtacaaggcgcgcgacctgcagaaccagggccgcatcgtcgccctcaagaagatccggctcgaggccgaggacgagggcgtcccctcgacggccatccgcgagatctccctcctcaaggagatgcgcgaccccaacatcgtcaagctgtacaacatcgtccacgccgacggccacaagctgtacctcgtcttcgagttcctcgacctcgacctcaagaagtacatggaggccctgcccgtgtccgacggcggccgcggcaaggccttgccagaaggcacgggcgtcgagctgggccggctggggctcggcgacatgatggtcaagaagttcatgagccagctgtgcgacggcgtccgctactgccactcccaccgcgtcctgcaccgcgacctcaagccccagaacctgctcatcgaccgcgacggcaacctcaagctcgccgacttcggcctcgcccgcgccttcggtgtgcccctgcgcacttatacacatgaggtcgtgacgctgtggtaccgtgcccccgagattcttttggggggtcgtcagtactcgactggagtcgacatgtggtccgtcggctgcatcttcgccgagatgtgcacgcgcaagcccctcttccccggcgattccgagatcgaccagatcttcaagaccttccgtctcctgggcacgccctccgaggacatctggcccggcgtcacatcctaccccgacttcaaggcctccttccccaagtggaagcgcgacttctcccagcccctctgcaccaacctcgacgacaacggcctcgacctgctcgaggccatgctcgtctacgaccccgccggccgcatctccgccaagcaggcctgcatccacccttacttctccgatttcacgagacccgtcgctcagcccctgacgtga

SEQ ID NO: 39694 - protein, 319 aa, Muscodor strobelii
  misc_feature: SGI Peptide ID NO. 573820
  misc_feature (4)..(307): Pfam Id: PF00069 Pfam Desc: Protein kinase domain
  misc_feature (4)..(172): Pfam Id: PF07714 Pfam Desc: Protein tyrosine kinase
  misc_feature (1)..(315): NCBI GI: 171682588 Blast Desc: protein product [Podospora anserina] gi|170941253|emb|CAP66903.1| protein product [Podospora anserina]
  misc_feature (1)..(310): NCBI GI: 116202813 Blast Desc: cell division control protein 2 [Chaetomium globosum CBS 148.51] gi|88177809|gb|EAQ85277.1| cell division control protein 2 [Chaetomium globosum CBS 148.51]
  misc_feature (1)..(311): NCBI GI: 85095628 Blast Desc: cell division control protein 2 [Neurospora crassa OR74A] gi|28921588|gb|EAA30881.1| cell division control protein 2 [Neurospora crassa OR74A]
  misc_feature (1)..(309): NCBI GI: 156060315 Blast Desc: cell division control protein 2 [Sclerotinia sclerotiorum 1980] gi|154699704|gb|EDN99442.1| cell division control protein 2 [Sclerotinia sclerotiorum 1980]
  misc_feature (1)..(312): NCBI GI: 256733465 Blast Desc: [Nectria haematococca mpVI 77-13-4]
  misc_feature (1)..(309): NCBI GI: 154292618 Blast Desc: cell division control protein 2 [Botryotinia fuckeliana B05.10] gi|150845849|gb|EDN21042.1| cell division control protein 2 [Botryotinia fuckeliana B05.10]
  misc_feature (1)..(307): NCBI GI: 46128181 Blast Desc: CDC2_AJECA Cell division control protein 2 (Cyclin-dependent protein kinase) [Gibberella zeae PH-1]
  misc_feature (1)..(311): NCBI GI: 39951439 Blast Desc: cell division control protein 2 [Magnaporthe grisea 70-15] gi|145020814|gb|EDK04943.1| cell division control protein 2 [Magnaporthe grisea 70-15]
  misc_feature (1)..(314): NCBI GI: 7769677 Blast Desc: AF252391_1 cyclin-dependent protein kinase CDC2 [Sporothrix schenckii] gi|7769679|gb|AAF69501.1|AF252392_1 cyclin-dependent protein kinase CDC2 [Sporothrix schenckii]
  misc_feature (1)..(308): NCBI GI: 154274840 Blast Desc: cell division control protein 2 [Ajellomyces capsulatus NAm1] gi|1705674|sp|P54119.1|CDC2_AJECA RecName: Full=Cell division control protein 2; AltName: protein kinase 2
  misc_feature (1)..(308): SWISSPROT Homolog: EC 2.7.11.22 Cyclin-dependent kinase
  misc_feature (1)..(308): SWISSPROT Homolog: EC 2.7.11.23 [RNA-polymerase]-subunit kinase
MENYQKLEKIGEGTYGVVYKARDLQNQGRIVALKKIRLEAEDEGVPSTAIREISLLKEMRDPNIVKLYNIVHADGHKLYLVFEFLDLDLKKYMEALPVSDGGRGKALPEGTGVELGRLGLGDMMVKKFMSQLCDGVRYCHSHRVLHRDLKPQNLLIDRDGNLKLADFGLARAFGVPLRTYTHEVVTLWYRAPEILLGGRQYSTGVDMWSVGCIFAEMCTRKPLFPGDSEIDQIFKTFRLLGTPSEDIWPGVTSYPDFKASFPKWKRDFSQPLCTNLDDNGLDLLEAMLVYDPAGRISAKQACIHPYFSDFTRPVAQPLT

SEQ ID NO: 39695 - DNA, 2158 bp, Muscodor strobelii
  misc_feature: SGI EST ID NO. CUFF.95798.0
  misc_feature: Variant of the nucleotide sequence at SEQ ID NO 39693
gcgcgtatgtggtgctgatgtttattcgaaaacaagcagtggtggggcgacggaggcaccaacttgtctgcaaagggagtcgtcttgtcttcgacgacgccagactacggcaactagtttagcagacagccaaatgaggcagaattgagattgacttcatctcggggtctccggtccttctcttttttcttttcatcaccggccttggactctgttgtggccgtggttgctgcccctcgatccgtctcgccaggccaaaaacaccccgccaaccaactgtgtctgattacttgcacgcggcaccgattgtagacaagtcaacaccaccatcgctgatcaatacatctgcccaccaccacactcctttgccgacgccgtgcagcagaccagattcaatactgaaaccaactcatctgtccaattcgagtcgcactgaggtagtcagccatctgccgcaacgatggagaactaccagaagctagagaagatcggtgaaggtacgtacggagtggtgtacaaggcgcgcgacctgcagaaccagggccgcatcgtcgccctcaagaagatccggctcgaggccgaggacgagggcgtcccctcgacggccatccgcgagatctccctcctcaaggagatgcgcgaccccaacatcgtcaagctgtacaacatcgtccacgccgacggccacaagctgtacctcgtcttcgagttcctcgacctcgacctcaagaagtacatggaggccctgcccgtgtccgacggcggccgcggcaaggccttgccagaaggcacgggcgtcgagctgggccggctggggctcggcgacatgatggtcaagaagttcatgagccagctgtgcgacggcgtccgctactgccactcccaccgcgtcctgcaccgcgacctcaagccccagaacctgctcatcgaccgcgacggcaacctcaagctcgccgacttcggcctcgcccgcgccttcggtgtgcccctgcgcacttatacacatgaggtcgtgacgctgtggtaccgtgcccccgagattcttttggggggtcgtcagtactcgactggagtcgacatgtggtccgtcggctgcatcttcgccgagatgtgcacgcgcaagcccctcttccccggcgattccgagatcgaccagatcttcaagaccttccgtctcctgggcacgccctccgaggacatctggcccggcgtcacatcctaccccgacttcaaggcctccttccccaagtggaagcgcgacttctcccagcccctctgcaccaacctcgacgacaacggcctcgacctgctcgaggccatgctcgtctacgaccccgccggccgcatctccgccaagcaggcctgcatccacccttacttctccgatttcacgagacccgtcgctcagcccctgacgtgatcgcagtattactctggcatgtgaatgatgatcatccctgtgggatagatacggacggcacgaagagtaactgtaatcctacacgctgagcatctttggctttcaggataggcttgccaccacactttactgagcacatgtacaaagttgggcctgctcgtgtcatcctaccacctctctccaatgcttgatgcacgcggctagtaggctggtatctgttcaacatgaccccacgacgacactttgacgacaaactttctgcgtcaatgaatgatttggacggcgttgggggttggttggcggcaacgggcagcatactttagatctcgagtggacttgctccacgacgcgctggtttgatgatgacgattcggccttgtgagggctatacgtgtttgatctttcctttgtgcgggcggtaactatggactgcgtatgactaccctaatggcagctatggagacaggcgttgcgtttgcacatatgattgtcgtacgggactgaacaaaatgcgagttgatcattcatgctcttgctatgtgatgtcgcgtgaggtatgatctgtgatgtgagctgatggattcctcccgttgtcatatcgagatgaattgtgaccgtcaaatcagttactcttccctcagagcgcgccgctgaacctttcaagctttcccactcttcgcaaataagccgaagacctcgttccttgtaccgttgcattaataacatacctgcttacta

SEQ ID NO: 39696 - DNA, 1113 bp, Muscodor strobelii
  misc_feature: SGI cDNA ID NO. 573821
  misc_feature: Encodes the peptide sequence at SEQ ID NO 39697
atgaccatcgacctcaccaccctggatgcccacgagcagccatccgacgaactgcgccgactgtggaaggcatactcccgaacagagcatgcagactttgtcagtcatccagacattgacgagctcgacgtgaagaactcgaccggcaaattccacacagctggaagcataccaagtgcacagctgcaggagtcatataccctacttatgggaggtgtgtggaatgaggaggtcgaagatgcccccatctactatcacccgcttctgccaggccttctgatcgtgccatctctagtgccacctgccctgcagaagacactgctcactaagatgatccaccgggacttagccaacccgacgcacaagaccaatctgcatctgcactacgagctgccctacctagatgcacaatcacccagcaatgaccaaccctgcacacagcaggtagatcggtccaaatcattcttcacctacagcccggactcgcccgcccgctttacacctaaggactcgaccgtgcacaagcccctcagcatcaaacaggttctcgagcgccgactctcctgggtcacccttggcggtcaatacgactggacgaatcgcgagtatcctaaacagctgcctcctgacttcccgcaggacatcggcgggttcttgcagacgctgtttccggacacgattgcgcaagctgctattgtcaatttttactctcccggcgatacgatgatgatgcatcgcgatgtgagcgaggagacggataagggactggtcagtctgagtttggggtgtgatgcgctgtttatgattgcgccgaatgagtatgagaagactgcgcaggaaatcaaaagccaggagaagagcgaggatgaagggaaggcagagaagggcgcagagaagcagaagccgtatttgctcctgagattgaggagtggtgatgcgatttatatgagtcaggagagtcggtatgcttggcatggggtgccgaaggtgctgaaggggacttgtcccgagttcttgcaggattggcctgcggaggatggagagtttgaggagtggaggggatggatgaggaataagagggtcaatctgaatgttaggcagatgagggattga

SEQ ID NO: 39697 - protein, 370 aa, Muscodor strobelii
  misc_feature: SGI Peptide ID NO. 573821
  misc_feature (1)..(370): NCBI GI: 39951441 Blast Desc: MGG_01363 [Magnaporthe grisea 70-15] gi|145020813|gb|EDK04942.1| MGG_01363 [Magnaporthe grisea 70-15]
  misc_feature (1)..(370): NCBI GI: 171682590 Blast Desc: protein product [Podospora anserina] gi|170941254|emb|CAP66904.1| protein product [Podospora anserina]
  misc_feature (2)..(370): NCBI GI: 256727191 Blast Desc: NECHADRAFT_103594 [Nectria haematococca mpVI 77-13-4]
  misc_feature (8)..(370): NCBI GI: 164422709 Blast Desc: NCU09779 [Neurospora crassa OR74A] gi|157069787|gb|EAA30882.2| conserved [Neurospora crassa OR74A]
  misc_feature (3)..(369): NCBI GI: 239615607 Blast Desc: oxidoreductase [Ajellomyces dermatitidis ER-3]
  misc_feature (3)..(369): NCBI GI: 261199670 Blast Desc: oxidoreductase [Ajellomyces dermatitidis SLH14081] gi|239594444|gb|EEQ77025.1| oxidoreductase [Ajellomyces dermatitidis SLH14081]
  misc_feature (3)..(364): NCBI GI: 225557481 Blast Desc: oxidoreductase [Ajellomyces capsulatus G186AR]
  misc_feature (3)..(369): NCBI GI: 226282698 Blast Desc: oxidoreductase [Paracoccidioides brasiliensis Pb01]
  misc_feature (125)..(370): NCBI GI: 261359384 Blast Desc: oxidoreductase [Verticillium albo-atrum VaMs.102]
  misc_feature (3)..(364): NCBI GI: 240278118 Blast Desc: oxidoreductase [Ajellomyces capsulatus H143]
MTIDLTTLDAHEQPSDELRRLWKAYSRTEHADFVSHPDIDELDVKNSTGKFHTAGSIPSAQLQESYTLLMGGVWNEEVEDAPIYYHPLLPGLLIVPSLVPPALQKTLLTKMIHRDLANPTHKTNLHLHYELPYLDAQSPSNDQPCTQQVDRSKSFFTYSPDSPARFTPKDSTVHKPLSIKQVLERRLSWVTLGGQYDWTNREYPKQLPPDFPQDIGGFLQTLFPDTIAQAAIVNFYSPGDTMMMHRDVSEETDKGLVSLSLGCDALFMIAPNEYEKTAQEIKSQEKSEDEGKAEKGAEKQKPYLLLRLRSGDAIYMSQESRYAWHGVPKVLKGTCPEFLQDWPAEDGEFEEWRGWMRNKRVNLNVRQMRD

SEQ ID NO: 39698 - DNA, 1503 bp, Muscodor strobelii
  misc_feature: SGI EST ID NO. CUFF.96126.0
  misc_feature: Variant of the nucleotide sequence at SEQ ID NO 39696
tacaacaccaagatcaagcccatcgccagataatgccacacgacccaacgcctcatcttgtgcataagccgtaattgaatacagtcaccatatccccaagtcaagcgaggtgtccgatgttactgcaagtgtcgctgactgcccaagaaccatcatgaccatcgacctcaccaccctggatgcccacgagcagccatccgacgaactgcgccgactgtggaaggcatactcccgaacagagcatgcagactttgtcagtcatccagacattgacgagctcgacgtgaagaactcgaccggcaaattccacacagctggaagcataccaagtgcacagctgcaggagtcatataccctacttatgggaggtgtgtggaatgaggaggtcgaagatgcccccatctactatcacccgcttctgccaggccttctgatcgtgccatctctagtgccacctgccctgcagaagacactgctcactaagatgatccaccgggacttagccaacccgacgcacaagaccaatctgcatctgcactacgagctgccctacctagatgcacaatcacccagcaatgaccaaccctgcacacagcaggtagatcggtccaaatcattcttcacctacagcccggactcgcccgcccgctttacacctaaggactcgaccgtgcacaagcccctcagcatcaaacaggttctcgagcgccgactctcctgggtcacccttggcggtcaatacgactggacgaatcgcgagtatcctaaacagctgcctcctgacttcccgcaggacatcggcgggttcttgcagacgctgtttccggacacgattgcgcaagctgctattgtcaatttttactctcccggcgatacgatgatgatgcatcgcgatgtgagcgaggagacggataagggactggtcagtctgagtttggggtgtgatgcgctgtttatgattgcgccgaatgagtatgagaagactgcgcaggaaatcaaaagccaggagaagagcgaggatgaagggaaggcagagaagggcgcagagaagcagaagccgtatttgctcctgagattgaggagtggtgatgcgatttatatgagtcaggagagtcggtatgcttggcatggggtgccgaaggtgctgaaggggacttgtcccgagttcttgcaggattggcctgcggaggatggagagtttgaggagtggaggggatggatgaggaataagagggtcaatctgaatgttaggcagatgagggattgaaagggagacgagaatgggaacacatcatggggctgtggtgatcttgcctggtcgtcgtggtctggtggggagcggttgaaaaggggcttttatgttttgctcatttgcttagctctaattacgcagtctcgaaatctcgcgacgtggtgatggtggcatttgcaatggcaatagttcattacacgatagacgaaagactcattctcatgaataaactgactacagtgatgacccag

SEQ ID NO: 39699 - DNA, 771 bp, Muscodor strobelii
  misc_feature: SGI cDNA ID NO. 573822
  misc_feature: Encodes the peptide sequence at SEQ ID NO 39700
atgaagcgccactacgaaaacttctaccgcgaagatctcgccgtatcttccacatccggcgtagaccaaacccacagactaaactacgcagtctccaacttccgccccatgtattatatcaaaatgtacccccaggacaaatcaaagttagagatgtgtttcgacacaacaaactaccaagcccaattcccctccaaggtccccttcgagcaacacgtcttccagactatctacctaaacaaagatcgcgatgtgcacttatggagcgatgatgaaatagacgagagcaagatcatacgcaaggattggtggcatcagctctgtcactcgtggacacactacgcgttcgtcgtgccctggatcatgttcctgcaagctcgaaaccatacccgctacgctgggtcctggaccctcgtcaatgctcacgaagtcgctgtcttgtccggtgttgccgccgcagtgtccctcggcgccacataccccgaagatttagaacacgacaaattcgcgtttctttgttttagattgtattacctgttgacgtatggcaagtggtatcgaagacattacacgaagggcaataagaaggacagcagtgagactgataaagcgaaagatggacgaagttgggctagtgggttgtatggcagtgattataaggggcctggtgtgagcggcgaggagagattgacgtggaggcaggagatgaagagtggacgcagtacggcggatttggctgatgggaatgcgcccgggaggagccagccttga

SEQ ID NO: 39700 - protein, 256 aa, Muscodor strobelii
  misc_feature: SGI Peptide ID NO. 573822
  misc_feature (1)..(246): NCBI GI: 46133839 Blast Desc: FG09059.1 [Gibberella zeae PH-1]
  misc_feature (1)..(256): NCBI GI: 261354363 Blast Desc: conserved [Verticillium albo-atrum VaMs.102]
  misc_feature (1)..(235): NCBI GI: 169595982 Blast Desc: SNOG_00738 [Phaeosphaeria nodorum SN15] gi|160701202|gb|EAT92233.2| SNOG_00738 [Phaeosphaeria nodorum SN15]
  misc_feature (1)..(235): NCBI GI: 18376238 Blast Desc: [Neurospora crassa]
  misc_feature (1)..(235): NCBI GI: 189202182 Blast Desc: conserved [Pyrenophora tritici-repentis Pt-1C-BFP] gi|187984526|gb|EDU50014.1| conserved [Pyrenophora tritici-repentis Pt-1C-BFP]
  misc_feature (1)..(235): NCBI GI: 171693417 Blast Desc: protein product [Podospora anserina] gi|170946657|emb|CAP73460.1| protein product [Podospora anserina]
  misc_feature (1)..(188): NCBI GI: 164426193 Blast Desc: NCU01089 [Neurospora crassa OR74A] gi|157071235|gb|EAA32465.2| conserved [Neurospora crassa OR74A]
  misc_feature (2)..(186): NCBI GI: 39953624 Blast Desc: MGG_08846 [Magnaporthe grisea 70-15] gi|145021218|gb|EDK05347.1| MGG_08846 [Magnaporthe grisea 70-15]
  misc_feature (5)..(187): NCBI GI: 242823909 Blast Desc: flavin-containing amine oxidasedehydrogenase, [Talaromyces stipitatus ATCC 10500] gi|218713075|gb|EED12500.1| flavin-containing amine oxidasedehydrogenase, [Talaromyces ATCC
  misc_feature (2)..(195): NCBI GI: 256726220 Blast Desc: NECHADRAFT_42807 [Nectria haematococca mpVI 77-13-4]
MKRHYENFYREDLAVSSTSGVDQTHRLNYAVSNFRPMYYIKMYPQDKSKLEMCFDTTNYQAQFPSKVPFEQHVFQTIYLNKDRDVHLWSDDEIDESKIIRKDWWHQLCHSWTHYAFVVPWIMFLQARNHTRYAGSWTLVNAHEVAVLSGVAAAVSLGATYPEDLEHDKFAFLCFRLYYLLTYGKWYRRHYTKGNKKDSSETDKAKDGRSWASGLYGSDYKGPGVSGEERLTWRQEMKSGRSTADLADGNAPGRSQP

SEQ ID NO: 39701 - DNA, 3360 bp, Muscodor strobelii
  misc_feature: SGI EST ID NO. CUFF.95801.0
  misc_feature: Variant of the nucleotide sequence at SEQ ID NO 39699
ctccggtcctgcacgttttctcatgacgagacctccctcccatctacacatctggagggtaacctggagtccgggtaggctttcatccagatattttgaggctatatggtctttcacgtctttattctcgcaatgtaaggctcatgatctcccgggtagtcagttttcgtggtgttccagatggtggtgagccgccccgtagtgctgtcgcatcccctatcaccactcaacatggtgttttgcctcccctaagcttatggtatggcgtacattgtctacagaagctacccggtcgtgatggttttcttggtgtttcgatttgtgaagctatctacactgcccgttcccatctggtccaactccatgatggtggttgcgggactggtcgcatctcttacccgtgagcttttctattgccaatttgcattgcattcatgattctcatcgtctcgcggacttcattcatttagagtgaggccatcgtgacctccagctgcaccatgtcgtcgccggccgtggcgttgctatggtgtcgctggcaacccgcccgcccacgcctcgtcacccacccgcctaccttcgcgcccgcagccagcttcaccatacctgtctaatacatttgacactcaattgacttgtcgtaatctatgtcgtgatgcttttttggtgttgttcatttttccaaacttgatgtttcgtcaacacaaccacgtgacctgcatgcatactagtgcaccgacccaactttatttgtttcagtctaagacagcctttgaatcacataattcatttaactttgcaattgagcctctgcatgcttatatttaattgaaatcggacatgcaccaatctagacttgttttcaattcttcctgtctgcattgtgttgtcgcattgatatcttgaacgcattgcgagtatctgacgagacgtcgtggcacggatgcatgcggtatgtggagatgcatcgggacgggtgggacttgtgtcaaatttcaagcagatcagatacccgacagccgccctttaccccgtcgcaatcgtccaatctcgacgagttgcgtccgcaaaattcgcagaaacccaatggacaatccaactatccactcatgccgaaatcgaacgattacgccaaatgcacgatgcacgatgcacctcctaagcagatctccccaagatcggcccgcgacaccagaagggcgctagctgccgccatctcgggagctagatcgatgacgtcgtgtcagtatatgtggccatcatcacccttagtcaatgagtgagacatagcaatggaaatgagattatatgagattccactgatgtttgcacatgtacctcttattttcacgatgaactcaactctagtcccatgtgtgactgagcgtctgagttttgtaaggtgtgattgaatggcgaacaactacgagaccttcaaccaagatatcgaacgacagagcatgatggctcaaaacgggaacaagagcccagacgggcgaaagcgcgttctcgttgtcggcgccggcgcagctggcatgtcaacagcctaccacctatctcagcacccagataaattcaacgtgacactcatagacgcagtagattactgcggcggacaagccttctcaatcccaatcgacaaggaaacccacggcgcatcatggtgcaaccaaggcgtgcaaggaggctcatccatcttccaccacacactcaccatgtttgcacgtcaggggtatcacgcagacccggtagagctccaagtctcattcggcaaagacgacacattctggaccaacgtcttccccaccaaacttatctccaagcacgcgaaggaagtgaagagattagtcaccatgttgaagatcatgcgatggttcgaagtcttctttgcattattgccattgagactggtattcaagatgtttctcttctccgaagacttcatcaacacggtcgcattgccaatgacagccttattcctcgggacaggaaacgcgactcccgaagtgcccgcaataatgtttgagcggctgtgcacatccccaacatacggaatgtggtacaagcccgacccgcacagcgtggtctcaaacaaaccgccaatggtcgtatttccaaatttcagcgagttctacgagacctggcgcaaagacctgatctcccggggcgtaacagtccgtctctcaactgagttaacagaagtcaaaaaacgagacaagaacggcgtagtagtagctctcaaaccacggacccccgtacccgacggccacaaccccaacgatgccgatcaggacaccccatcaacagaagaagaatacgacgagctagtcctctgctgtctagcagacacagacaagaaaatcctcggacgctccgcaacctggcgggagcgccgcgtcctcgggtccgcaatattcagcgacgacataaccatcacgcattctgactcctcctacatgaagcgccactacgaaaacttctaccgcgaagatctcgccgtatcttccacatccggcgtagaccaaacccacagactaaactacgcagtctccaacttccgccccatgtattatatcaaaatgtacccccaggacaaatcaaagttagagatgtgtttcgacacaacaaactaccaagcccaattcccctccaaggtccccttcgagcaacacgtcttccagactatctacctaaacaaagatcgcgatgtgcacttatggagcgatgatgaaatagacgagagcaagatcatacgcaaggattggtggcatcagctctgtcactcgtggacacactacgcgttcgtcgtgccctggatcatgttcctgcaagctcgaaaccatacccgctacgctgggtcctggaccctcgtcaatgctcacgaagtcgctgtcttgtccggtgttgccgccgcagtgtccctcggcgccacataccccgaagatttagaacacgacaaattcgcgtttctttgttttagattgtattacctgttgacgtatggcaagtggtatcgaagacattacacgaagggcaataagaaggacagcagtgagactgataaagcgaaagatggacgaagttgggctagtgggttgtatggcagtgattataaggggcctggtgtgagcggcgaggagagattgacgtggaggcaggagatgaagagtggacgcagtacggcggatttggctgatgggaatgcgcccgggaggagccagccttgatgtgaatatgaatgggatagggcattgagacggattgggatcgtgagatacagagatagaggataggaaaagatgttgagatgatgcaatatcgcataatgtaattgagtaatgagtaatgagaatgtgtctc

SEQ ID NO: 39702 - DNA, 1767 bp, Muscodor strobelii
  misc_feature: SGI cDNA ID NO. 573823
  misc_feature: Encodes the peptide sequence at SEQ ID NO 39703
atgatggctcaaaacgggaacaagagcccagacgggcgaaagcgcgttctcgttgtcggcgccggcgcagctggcatgtcaacagcctaccacctatctcagcacccagataaattcaacgtgacactcatagacgcagtagattactgcggcggacaagccttctcaatcccaatcgacaaggaaacccacggcgcatcatggtgcaaccaaggcgtgcaaggaggctcatccatcttccaccacacactcaccatgtttgcacgtcaggggtatcacgcagacccggtagagctccaagtctcattcggcaaagacgacacattctggaccaacgtcttccccaccaaacttatctccaagcacgcgaaggaagtgaagagattagtcaccatgttgaagatcatgcgatggttcgaagtcttctttgcattattgccattgagactggtattcaagatgtttctcttctccgaagacttcatcaacacggtcgcattgccaatgacagccttattcctcgggacaggaaacgcgactcccgaagtgcccgcaataatgtttgagcggctgtgcacatccccaacatacggaatgtggtacaagcccgacccgcacagcgtggtctcaaacaaaccgccaatggtcgtatttccaaatttcagcgagttctacgagacctggcgcaaagacctgatctcccggggcgtaacagtccgtctctcaactgagttaacagaagtcaaaaaacgagacaagaacggcgtagtagtagctctcaaaccacggacccccgtacccgacggccacaaccccaacgatgccgatcaggacaccccatcaacagaagaagaatacgacgagctagtcctctgctgtctagcagacacagacaagaaaatcctcggacgctccgcaacctggcgggagcgccgcgtcctcgggtccgcaatattcagcgacgacataaccatcacgcattctgactcctcctacatgaagcgccactacgaaaacttctaccgcgaagatctcgccgtatcttccacatccggcgtagaccaaacccacagactaaactacgcagtctccaacttccgccccatgtattatatcaaaatgtacccccaggacaaatcaaagttagagatgtgtttcgacacaacaaactaccaagcccaattcccctccaaggtccccttcgagcaacacgtcttccagactatctacctaaacaaagatcgcgatgtgcacttatggagcgatgatgaaatagacgagagcaagatcatacgcaaggattggtggcatcagctctgtcactcgtggacacactacgcgttcgtcgtgccctggatcatgttcctgcaagctcgaaaccatacccgctacgctgggtcctggaccctcgtcaatgctcacgaagtcgctgtcttgtccggtgttgccgccgcagtgtccctcggcgccacataccccgaagatttagaacacgacaaattcgcgtttctttgttttagattgtattacctgttgacgtatggcaagtggtatcgaagacattacacgaagggcaataagaaggacagcagtgagactgataaagcgaaagatggacgaagttgggctagtgggttgtatggcagtgattataaggggcctggtgtgagcggcgaggagagattgacgtggaggcaggagatgaagagtggacgcagtacggcggatttggctgatgggaatgcgcccgggaggagccagccttga

SEQ ID NO: 39703 - protein, 588 aa, Muscodor strobelii
  misc_feature: SGI Peptide ID NO. 573823
  misc_feature (15)..(73): Pfam Id: PF01266 Pfam Desc: FAD dependent oxidoreductase
  misc_feature (15)..(55): Pfam Id: PF00890 Pfam Desc: FAD binding domain
  misc_feature (16)..(46): Pfam Id: PF05834 Pfam Desc: Lycopene cyclase protein
  misc_feature (15)..(46): Pfam Id: PF07992 Pfam Desc: Pyridine nucleotide-disulphide oxidoreductase
  misc_feature (1)..(578): NCBI GI: 46133839 Blast Desc: FG09059.1 [Gibberella zeae PH-1]
  misc_feature (3)..(588): NCBI GI: 261354363 Blast Desc: conserved [Verticillium albo-atrum VaMs.102]
  misc_feature (6)..(567): NCBI GI: 189202182 Blast Desc: conserved [Pyrenophora tritici-repentis Pt-1C-BFP] gi|187984526|gb|EDU50014.1| conserved [Pyrenophora tritici-repentis Pt-1C-BFP]
  misc_feature (25)..(567): NCBI GI: 18376238 Blast Desc: [Neurospora crassa]
  misc_feature (13)..(520): NCBI GI: 164426193 Blast Desc: NCU01089 [Neurospora crassa OR74A] gi|157071235|gb|EAA32465.2| conserved [Neurospora crassa OR74A]
  misc_feature (26)..(567): NCBI GI: 171693417 Blast Desc: protein product [Podospora anserina] gi|170946657|emb|CAP73460.1| protein product [Podospora anserina]
  misc_feature (132)..(567): NCBI GI: 169595982 Blast Desc: SNOG_00738 [Phaeosphaeria nodorum SN15] gi|160701202|gb|EAT92233.2| SNOG_00738 [Phaeosphaeria nodorum SN15]
  misc_feature (9)..(520): NCBI GI: 238488259 Blast Desc: flavin-containing amine oxidasedehydrogenase, [Aspergillus flavus NRRL3357] gi|220697755|gb|EED54095.1| flavin-containing amine oxidasedehydrogenase, [Aspergillus flavus
  misc_feature (13)..(527): NCBI GI: 256726220 Blast Desc: NECHADRAFT_42807 [Nectria haematococca mpVI 77-13-4]
  misc_feature (2)..(519): NCBI GI: 115492551 Blast Desc: conserved [Aspergillus terreus NIH2624] gi|114197763|gb|EAU39463.1| conserved [Aspergillus terreus NIH2624]
MMAQNGNKSPDGRKRVLVVGAGAAGMSTAYHLSQHPDKFNVTLIDAVDYCGGQAFSIPIDKETHGASWCNQGVQGGSSIFHHTLTMFARQGYHADPVELQVSFGKDDTFWTNVFPTKLISKHAKEVKRLVTMLKIMRWFEVFFALLPLRLVFKMFLFSEDFINTVALPMTALFLGTGNATPEVPAIMFERLCTSPTYGMWYKPDPHSVVSNKPPMVVFPNFSEFYETWRKDLISRGVTVRLSTELTEVKKRDKNGVVVALKPRTPVPDGHNPNDADQDTPSTEEEYDELVLCCLADTDKKILGRSATWRERRVLGSAIFSDDITITHSDSSYMKRHYENFYREDLAVSSTSGVDQTHRLNYAVSNFRPMYYIKMYPQDKSKLEMCFDTTNYQAQFPSKVPFEQHVFQTIYLNKDRDVHLWSDDEIDESKIIRKDWWHQLCHSWTHYAFVVPWIMFLQARNHTRYAGSWTLVNAHEVAVLSGVAAAVSLGATYPEDLEHDKFAFLCFRLYYLLTYGKWYRRHYTKGNKKDSSETDKAKDGRSWASGLYGSDYKGPGVSGEERLTWRQEMKSGRSTADLADGNAPGRSQP

SEQ ID NO: 39704 - DNA, 3360 bp, Muscodor strobelii; identical to SEQ ID NO: 39701
  misc_feature: SGI EST ID NO. CUFF.95801.0
  misc_feature: Variant of the nucleotide sequence at SEQ ID NO 39702

SEQ ID NO: 39705 - DNA, 279 bp, Muscodor strobelii
  misc_feature: SGI cDNA ID NO. 573824
  misc_feature: Elevated expression when VOC is produced
  misc_feature: Encodes the peptide sequence at SEQ ID NO 39706
atgcctcgcgaaggaacccgctctgccactggcaactcgcgcccgcgcgtcttccagcaggttgacactgcgcccgccatcaagcgcaccactaagcccaagtctacttctcccactggcgagaccaagaaggccaaggtcggccggcctgctggagtcaccaagaagaccaccgcacccaagaagaatggtgtcgctgctaaggtcaaggctgtcgccaaaaaggctgaggccaaggtcaagaagactactgctaagcccaaggccgctgccaagtaa

SEQ ID NO: 39706 - protein, 92 aa, Muscodor strobelii
  misc_feature: SGI Peptide ID NO. 573824
  misc_feature (1)..(69): NCBI GI: 171682208 Blast Desc: protein product [Podospora anserina] gi|170941063|emb|CAP66713.1| protein product [Podospora anserina]
  misc_feature (1)..(83): NCBI GI: 85086213 Blast Desc: NCU04036 [Neurospora crassa OR74A] gi|28918745|gb|EAA28415.1| [Neurospora crassa OR74A] gi|39979227|emb|CAE85597.1| [Neurospora crassa]
  misc_feature (1)..(85): NCBI GI: 39974595 Blast Desc: [Magnaporthe grisea 70-15] gi|145018543|gb|EDK02822.1| [Magnaporthe grisea 70-15]
  misc_feature (1)..(64): NCBI GI: 116202343 Blast Desc: [Chaetomium globosum CBS 148.51] gi|88177574|gb|EAQ85042.1| [Chaetomium globosum CBS 148.51]
  misc_feature: Useful for introducing or modulating the production of volatile compounds
MPREGTRSATGNSRPRVFQQVDTAPAIKRTTKPKSTSPTGETKKAKVGRPAGVTKKTTAPKKNGVAAKVKAVAKKAEAKVKKTTAKPKAAAK

SEQ ID NO: 39707 - DNA, 1191 bp, Muscodor strobelii
  misc_feature: SGI EST ID NO. CUFF.95831.0
  misc_feature: Variant of the nucleotide sequence at SEQ ID NO 39705
gcgacagattaggtatgaggagggtgctaatcaaccagcctaaggttcaatacggcacaagcgaggtaacggccagagcgagtgcgggcaggccaggcagttgatttggagaagggcagtgtgtggtcgcgcgcgcaacaaaacagagcgagcgagaccacacacaatcacaacacaccacccgccctcttcggtcctctcgttcttcgtccttcgtccttctgcccaatcctctcctcttccctccaacaacaatctctgcttctcacgaccagatcatcgttcgtctgacactgtaatcaattcatctttgaatttttcaattttccaaaatttcaacatcccaatcactcctacatttctcaacatgcctcgcgaaggaacccgctctgccactggcaactcgcgcccgcgcgtcttccagcaggttgacactgcgcccgccatcaagcgcaccactaagcccaagtctacttctcccactggcgagaccaagaaggccaaggtcggccggcctgctggagtcaccaagaagaccaccgcacccaagaagaatggtgtcgctgctaaggtcaaggctgtcgccaaaaaggctgaggccaaggtcaagaagactactgctaagcccaaggccgctgccaagtaaacacttgatgttcgacaatctcttcgtatgaatgaccatgtacatggcagtgtacacgccgcaccagtatggtcagagctctcaatctggacggcggagatcttgtttgaactgtcaagccctggtctgatatcaggccatgcgtctgtatgcactcgcttgaatgcatacgcaccatgtctttcttccacacaagataccttagtctgcacattgttgtattgtcgtaatgtatggcgttcggggcaggcaagcgggatcaatgaagggggtcaagggacggtttcgagggcttgctggtatttgcaaagttgcctggtgtcgatggatcatgcacatgattcaatacatttgctaattactatgtccctgaatcctctcatacgtgtcgtcctgacaggctgatctgaattttccgatgatgtgtccattcaaagcccgatcctgggatggtttccttcatttagggccatgtccatacttgccgcttcatttttggagttcctttccactcatacagagtttcccgtccctggcaagattcg

SEQ ID NO: 39708 - DNA, 1197 bp, Muscodor strobelii
  misc_feature: SGI cDNA ID NO. 573825
  misc_feature: Elevated expression when VOC is produced
  misc_feature: Encodes the peptide sequence at SEQ ID NO 39709
atgctgtcctcaaagattctcaccgcgctacttctcgtagtgtctcttgccatcaacaccaccgtggcttgtgatggatcccatgcggttcatgacacgcaaaagtacaagaatgtggtgtactacgccgactggactcaatatgcccggggatttttccccgagagcatgcccgccgactgcatcgaccaagttctctttgctttcgctgcgttcgatagcgtgggcaaagtcgaccaggcgtatcctagtgatcctcaactcatcaatcagatccacggccttaagtctgtcaaccctggcctggaagtcctccttagcatcggcggctggactgcaagccaaaatggagggttcgcaaacatggctagcacaccgactgcgcgacagaacttcgctactaccgcagtttccctcatgaacacatggggcctgagcggactcgatcttgattgggagtggcccagtaatgccacagacgctggcaacatgctcgagctactgaaggtcatgcgtagccaacttgacgcccaaacgaatggctatcccacagcgaacacgagcaatcacggctttacccttagcgttagtctgcccgtggcggaggtcaactaccagtccctgcagcttggcgaattggacaaaattgtcgatcagttcaacgtgcaagcctatgacttcgccggtgcatgggggcaaccggctgcccacgcagcgaacctattcccaaatccaaataatccgaaagctacacctttcaacactgatgccgcaatcacccattacattcaaggtggtatcgaagcgaacaagatcacactcggcatgccactttatgggcacgccttcgataatacacctggtcttggtgaagattatgccagtgtgtcaatggggtcttgggaagtgggtatctgggactacaaagcgctgcccaaagcgggtgcagagatcctgtatgacgagacagccgttgctgcatactcgtacgataatttcacgcggcaactaatctctttcgacacaccacagagcgtccaggccaaggttgcctacctgaaggagaaaggactgggcggcgccatgttctgggaggcaagcggcgacaagacgggagacgatagtctagtgaggactgcatgcactgctctgcgtaattcgcctaagccccacgacatgccgtacccaacggcttga

SEQ ID NO: 39709 - protein, 398 aa, Muscodor strobelii
  misc_feature: SGI Peptide ID NO. 573825
  misc_feature (36)..(369): Pfam Id: PF00704 Pfam Desc: Glycosyl hydrolases family 18
  misc_feature (27)..(384): NCBI GI: 256728981 Blast Desc: NECHADRAFT_122567 [Nectria haematococca mpVI 77-13-4]
  misc_feature (38)..(384): NCBI GI: 13516885 Blast Desc: endochitinase-P [Hypocrea pseudokoningii]
  misc_feature (38)..(384): NCBI GI: 13516873 Blast Desc: endochitinase-G2 [Hypocrea virens]
  misc_feature (36)..(384): NCBI GI: 270160616 Blast Desc: chitinase [Trichoderma longibrachiatum]
  misc_feature (31)..(384): NCBI GI: 51988013 Blast Desc: 46 kDa chitinase [Hypocrea jecorina] gi|126032285|tpg|DAA05853.1| TPA_inf: chitinase 18-5 [Hypocrea jecorina]
  misc_feature (36)..(384): NCBI GI: 13516875 Blast Desc: endochitinase-HAR1 [Hypocrea lixii]
  misc_feature (36)..(384): NCBI GI: 13516883 Blast Desc: endochitinase-VIRI [Trichoderma viride]
  misc_feature (36)..(384): NCBI GI: 1223924 Blast Desc: endochitinase [Hypocrea lixii]
  misc_feature (6)..(384): NCBI GI: 159460232 Blast Desc: chitinase [Pochonia chlamydosporia]
  misc_feature (36)..(384): NCBI GI: 1345775 Blast Desc: CHI4_TRIHA RecName: Full=42 kDa endochitinase; Flags: Precursor gi|999376|gb|AAB34355.1| endochitinase [Hypocrea lixii]
  misc_feature (36)..(384): SWISSPROT Homolog: EC 3.2.1.14 Chitinase
  misc_feature: Useful for introducing or modulating the production of volatile compounds
MLSSKILTALLLVVSLAINTTVACDGSHAVHDTQKYKNVVYYADWTQYARGFFPESMPADCIDQVLFAFAAFDSVGKVDQAYPSDPQLINQIHGLKSVNPGLEVLLSIGGWTASQNGGFANMASTPTARQNFATTAVSLMNTWGLSGLDLDWEWPSNATDAGNMLELLKVMRSQLDAQTNGYPTANTSNHGFTLSVSLPVAEVNYQSLQLGELDKIVDQFNVQAYDFAGAWGQPAAHAANLFPNPNNPKATPFNTDAAITHYIQGGIEANKITLGMPLYGHAFDNTPGLGEDYASVSMGSWEVGIWDYKALPKAGAEILYDETAVAAYSYDNFTRQLISFDTPQSVQAKVAYLKEKGLGGAMFWEASGDKTGDDSLVRTACTALRNSPKPHDMPYPTA

SEQ ID NO: 39710 - DNA, 2384 bp, Muscodor strobelii
  misc_feature: SGI EST ID NO. CUFF.95836.0
  misc_feature: Variant of the nucleotide sequence at SEQ ID NO 39708
cgaaaacgtcatagtaattgtcttctcaggtcaaattcaacatcgtactcttcgggtcagtgtaagagtcaaatctcagatttaatcatcatgttgggtatcactaatctcctttgtctgatctttctgtgattctgcgctgtcttcccttctctcgcattgagatgagaaatgaatcttttagatcacacgtgtgcgactcgggggcactgcctatctcgttggaaagcgtcctcccttaccgcaagatgctgccagattactttctcagtaagacggacgtatctcgaatctcctttatttctcaaattgccaaagccgtacacactcattctaggactgtaatttgattgaaacagtttgctctccactttagaagccttattctcgctttcgaacggttgcacaggaggaatgacaaggagcacagatctagctgttctggcctacaggttcccaacccatctgtgaggtcccacattctgcttcgcaggaatgttcaacgcactgctccgtcaaatgttataaattgctagccgataatgatgccaggttctggcagtgagcctcagggctatcccggtgtctgctggaatgagagtatttgaataaggtcggcactcgcacccaccttggcctatatgataaacagcgtttggccggcgatgcgagagtgttctgcgtggaaccgccatcgtttcttgctgttccatctggtataacggagattggaagtcattgtgtgattattcggcgcattgaactccaaagggcattgaatgagattgttactaggacacatcatagctactagataacagatgtttacctgaccctccgcggcagcttccctccacacgctcatccctcaccctcgagctcagcgacagtggtggattcatttcctgaacatcaatcttcacacatcgtcgcccactcgttcgtgacgacacgatgctgtcctcaaagattctcaccgcgctacttctcgtagtgtctcttgccatcaacaccaccgtggcttgtgatggatcccatgcggttcatgacacgcaaaagtacaagaatgtggtgtactacgccgactggactcaatatgcccggggatttttccccgagagcatgcccgccgactgcatcgaccaagttctctttgctttcgctgcgttcgatagcgtgggcaaagtcgaccaggcgtatcctagtgatcctcaactcatcaatcagatccacggccttaagtctgtcaaccctggcctggaagtcctccttagcatcggcggctggactgcaagccaaaatggagggttcgcaaacatggctagcacaccgactgcgcgacagaacttcgctactaccgcagtttccctcatgaacacatggggcctgagcggactcgatcttgattgggagtggcccagtaatgccacagacgctggcaacatgctcgagctactgaaggtcatgcgtagccaacttgacgcccaaacgaatggctatcccacagcgaacacgagcaatcacggctttacccttagcgttagtctgcccgtggcggaggtcaactaccagtccctgcagcttggcgaattggacaaaattgtcgatcagttcaacgtgcaagcctatgacttcgccggtgcatgggggcaaccggctgcccacgcagcgaacctattcccaaatccaaataatccgaaagctacacctttcaacactgatgccgcaatcacccattacattcaaggtggtatcgaagcgaacaagatcacactcggcatgccactttatgggcacgccttcgataatacacctggtcttggtgaagattatgccagtgtgtcaatggggtcttgggaagtgggtatctgggactacaaagcgctgcccaaagcgggtgcagagatcctgtatgacgagacagccgttgctgcatactcgtacgataatttcacgcggcaactaatctctttcgacacaccacagagcgtccaggccaaggttgcctacctgaaggagaaaggactgggcggcgccatgttctgggaggcaagcggcgacaagacgggagacgatagtctagtgaggactgcatgcactgctctgcgtaattcgcctaagccccacgacatgccgtacccaacggcttgagctttatgctggttgaatatcggtattcgaggagtcttgagttacagatccgcactctgaggatcagagacgatgcgtccggtcagcgaatgcatctccacggcaatcgacgttagggttaacgaactctgcaaatgaggacatgttgcacgtgctagtgctccctgatgtacctcttgatgagtccatattgtgtctgtagatatatcatcgatccaaccattgcccactgc

SEQ ID NO: 39711 - DNA, 1203 bp, Muscodor strobelii
  misc_feature: SGI cDNA ID NO. 573826
  misc_feature: Encodes the peptide sequence at SEQ ID NO 39712
atggcctcaacaagctgggatgacaaggccaacatgacactggctcgcgtggtcctacacttcggggtcatggagcccaagaaagaccgacagttccctgataaagtgactaactggaatctgctggttaccgtttaccatgtgattttcggttactgttcgactaagaacgctatgcacacgcaatggagccgtttaaccaagacaaggggcaatgacgcaccaggtgccatcataaaacaactcaatgtgatcaattccaaccctgctgagtactcagagacgtttaaaacgctcgtcggccctttcgctccccaagttgaatgtgccacttgtaatgtgatggtgagcagcgacaagaccatgatcgtggcccatctcaatctctaccatacccaagctgcaagcgagcctaaccagctcaacgatgtccaagaggctagagagtcggaccatctccgacaacctgcacagcttcgccctttactacctgctcccaatgctcagccaagcgcccttggacagccactgccacttgtccaccaatcactctctctgcccatacagcacggcacttatggcaacactggcatgactgccagacgtgatcagctggtccaggcatacagaggccgagataaggttggccatcacggtttaatcggagagatagcagactccatctccgcagtcatggaggtactgtcggctacagactcaaacatggcagcacaagccagagaaatgtttgaagcacgtctcgaggagtttggaagcagagtcaatcgtaacgttgatcagatgccctatggggccggtgagcatagccaactgatgccgcctcctgtcgttcgataccagacaatgcagtcttaccagtcttctcctcatatcttgcagagccagcagcagtcgcttcagtttcacggctcccaggtacaagctcagcagtccccgtatctgcaccagcaaggcggacagacgcaatatggaggccagcgaaccagtggatatcagcagtcctatcaacaaggagctttgtctcagcaatttccgaaccaggagagtatgattttcgaggccggacatcaaagctcggctgcaccgggagagtatggaagcgagaacattggtatggaagcgagaacattggtaaccgagaaggctatcatggcaggcaagttaacattcctgaggctctag

SEQ ID NO: 39712 - protein, 400 aa, Muscodor strobelii
  misc_feature: SGI Peptide ID NO. 573826
MASTSWDDKANMTLARVVLHFGVMEPKKDRQFPDKVTNWNLLVTVYHVIFGYCSTKNAMHTQWSRLTKTRGNDAPGAIIKQLNVINSNPAEYSETFKTLVGPFAPQVECATCNVMVSSDKTMIVAHLNLYHTQAASEPNQLNDVQEARESDHLRQPAQLRPLLPAPNAQPSALGQPLPLVHQSLSLPIQHGTYGNTGMTARRDQLVQAYRGRDKVGHHGLIGEIADSISAVMEVLSATDSNMAAQAREMFEARLEEFGSRVNRNVDQMPYGAGEHSQLMPPPVVRYQTMQSYQSSPHILQSQQQSLQFHGSQVQAQQSPYLHQQGGQTQYGGQRTSGYQQSYQQGALSQQFPNQESMIFEAGHQSSAAPGEYGSENIGMEARTLVTEKAIMAGKLTFLRL

SEQ ID NO: 39713 - DNA, 990 bp, Muscodor strobelii
  misc_feature: SGI cDNA ID NO. 573827
  misc_feature: Elevated expression when VOC is produced
  misc_feature: Encodes the peptide sequence at SEQ ID NO 39714
atggtcaacaagtcatgcaagcctcaacttcgctggcttcttacaagggagctagaggagcttcagccagggtacttcacgcctgagctcgatcagataatggcaccccccggtcgtacaagtccttccggtttaacaagaatccagatcgtgagaggcaacatcatgcgaggccgacccaaatttcccgactcgctcaacatccggtatttggaggattttaactatagcaaggacgagttcgcggtcaatcaaacacttcacggaggcccacaggctgtctgtgcggatggctggggcgaaacattttggcgcggacctatcgttgcgtatttgaaagtaggcgatgccttcgatgcgtccctgatgaaggacatgcacttaacggcttatcgcgatgctatcgactaccttgcctacttccgcgagactgagggcagcatgattgatgggataggctcgatgacgcacttcagccggcgcgtgatggcggatagagccgggaagcttaaggcggtcaggatcaattgcgttcgcgaccaagctggtgatatctcacgccagttcgtacaggttgagataccgaaagcccaccaacttctccataccgagggtgacgatccgatggatatagtgcaagggcttggcgagacctgggttatgagaagctacccgagtccgaaagacgcggcagctgaagacacaaggaatccatatgctcgcatgctacttccaatgatatcggcgaaaggccctgatgacgaacctggagattggcgctgggctaagattccgaagtggcggcgacctttaaccactggaagtgtgctcgttgcagatcgcacgaagaaagatttgagtgtcagcagggtgcgagcagtgtgcaaaactatcgagaaatatgttgttccgcttctcaatggtcctgacatcgacgaggaagcagctatggcggctttgacagaagaggcggtgagggaattcatgtag

SEQ ID NO: 39714 - protein, 329 aa, Muscodor strobelii
  misc_feature: SGI Peptide ID NO. 573827
  misc_feature (160)..(306): NCBI GI: 169602325 Blast Desc: SNOG_04159 [Phaeosphaeria nodorum SN15] gi|160706143|gb|EAT87919.2| SNOG_04159 [Phaeosphaeria nodorum SN15]
  misc_feature: Useful for introducing or modulating the production of volatile compounds
MVNKSCKPQLRWLLTRELEELQPGYFTPELDQIMAPPGRTSPSGLTRIQIVRGNIMRGRPKFPDSLNIRYLEDFNYSKDEFAVNQTLHGGPQAVCADGWGETFWRGPIVAYLKVGDAFDASLMKDMHLTAYRDAIDYLAYFRETEGSMIDGIGSMTHFSRRVMADRAGKLKAVRINCVRDQAGDISRQFVQVEIPKAHQLLHTEGDDPMDIVQGLGETWVMRSYPSPKDAAAEDTRNPYARMLLPMISAKGPDDEPGDWRWAKIPKWRRPLTTGSVLVADRTKKDLSVSRVRAVCKTIEKYVVPLLNGPDIDEEAAMAALTEEAVREFM

SEQ ID NO: 39715 - DNA, 2053 bp, Muscodor strobelii
  misc_feature: SGI EST ID NO. CUFF.95845.0
  misc_feature: Variant of the nucleotide sequence at SEQ ID NO 39713
tagccatacagtgttactagacggagcattttcgagacttgcgcccgatcactgcaattgcatttggtagaggactgtgattctacgaattcaagtccgaatagatttctcccttcactcggggctaagtacaagactagatcttatggtgctgctcctattaatttcacggtcggcgaccaactcgacggcggcgatggtgaacacttctgtctaggctctgtttaggcgcgactggagagaagaactcattcaattcgaattcgctaagttcccggcctctgtcaaatggagttggcagtggttggtcgtatgtcttgaacccctcccattcaagattagaccgccattcggacttggaccctggtcgtggcgtagcagttgtgatctgtaccttacagataaccgcctacgatcctcgagcacggggctccccatgaggcagcaatacgcctctctcagtctacaatggcaagtcctattctctgtacaatttgtggcagtaacactgcccggctctgtactggatgtcgttcggcggcctactgctcgcttgaatgccagcaaactgattggcgaacgcatcgatacctctgtggtgctttcagaaaagtcgagccacgaccgtctccggcccactatctaggcgtcttcttccccatggtcaacaagtcatgcaagcctcaacttcgctggcttcttacaagggagctagaggagcttcagccagggtacttcacgcctgagctcgatcagataatggcaccccccggtcgtacaagtccttccggtttaacaagaatccagatcgtgagaggcaacatcatgcgaggccgacccaaatttcccgactcgctcaacatccggtatttggaggattttaactatagcaaggacgagttcgcggtcaatcaaacacttcacggaggcccacaggctgtctgtgcggatggctggggcgaaacattttggcgcggacctatcgttgcgtatttgaaagtaggcgatgccttcgatgcgtccctgatgaaggacatgcacttaacggcttatcgcgatgctatcgactaccttgcctacttccgcgagactgagggcagcatgattgatgggataggctcgatgacgcacttcagccggcgcgtgatggcggatagagccgggaagcttaaggcggtcaggatcaattgcgttcgcgaccaagctggtgatatctcacgccagttcgtacaggttgagataccgaaagcccaccaacttctccataccgagggtgacgatccgatggatatagtgcaagggcttggcgagacctgggttatgagaagctacccgagtccgaaagacgcggcagctgaagacacaaggaatccatatgctcgcatgctacttccaatgatatcggcgaaaggccctgatgacgaacctggagattggcgctgggctaagattccgaagtggcggcgacctttaaccactggaagtgtgctcgttgcagatcgcacgaagaaagatttgagtgtcagcagggtgcgagcagtgtgcaaaactatcgagaaatatgttgttccgcttctcaatggtcctgacatcgacgaggaagcagctatggcggctttgacagaagaggcggtgagggaattcatgtagcatgatgctgcatccttgggataaggacgcaaggtaccctctccaacaagctgtccatagtagaatatgacattaggtagctcatatttttttattcccgctctgctgtttaagggatgcctttggtgtctgcccgccccttaagatgcagctttaagcgacgtgtagctcggtgagttgggttaagtgaaaagtccgtagttctgacccctttccgacaatgcatgtcgctatcacgggatactcggacaaggcaatagcgctggagtgctcgtcattcagagattggcagcatactcactaagaggtgtgtcgtacgccagatatctccaacacgatttgagaacgatatcaagcagacatgcatcattacgagctactactcccacctagtatctattca

SEQ ID NO: 39716 - DNA, 1107 bp, Muscodor strobelii
  misc_feature: SGI cDNA ID NO. 573829
  misc_feature: Encodes the peptide sequence at SEQ ID NO 39717
atgcctattgctattcacaaggctctgcatattttggctgaaagacttggcgcatctttggacctatcgccggaggatcttgggaagtggaagtatatgtgcacagcctgcagctacttcaggctccccgatcatacggatggcattgtaaggttcggcacgaagcatttccgaagaggaggcgaagagcacacttttgatgacgtcccgtggaagttcctcttggagagcgtcgaatcccatatcaaaagggaagcagccgatgagcaacgaactgcgatattcaatagtgtgatggccggattacccaaaaacaaagcacttcccgactgggaacgaccaattgtaaatcctagcgccgaaaccctgacaccatattctcaatataggacgaaagagggagaagaagctctttctaacacagaaatgctagactggctcgcaaaagctgtggacctggacgagcgcaagatcagaatcatcaaagaacaaataacatggtgggatgctatgggcgatgacctgcgcagtcctatgctctcgttcggcagtggcaaagtgcgcggaggaagacttggtcgtgatcacacgtttgaggatgttccaaatcactacgtccgagataaacttatggattacactctgtccgaagtgaacaggtacaagtacacaaagggccatttggccctctgttccgacctaaccgaaagagagacgattgaatacatccatgagattatcagaatccgagagaaaatggacaaggacggaatgtcagatgaagaggcttgcaaatctcgttggtttcaaacaaagggtgcgaaaggcggcaagaagaaagccgttactgctaatggaaaacgtacgaggaagggtagggagggacagagtataggtaatggaaatgggatcgaccctatgtcgcgcaagcaagaagccggtgagactacagacaatatcgtcgattccagcagtattatttttcaagcgcgcaatggcaatgggggtcgcaaacgccggagcgacgtcgatgatgaaaatgaaaaggagacggataggctgacgaggagcaagtcgaaccgggcaaaggttccgaaactgtcataa

SEQ ID NO: 39717 - protein, 368 aa, Muscodor strobelii
  misc_feature: SGI Peptide ID NO. 573829
MPIAIHKALHILAERLGASLDLSPEDLGKWKYMCTACSYFRLPDHTDGIVRFGTKHFRRGGEEHTFDDVPWKFLLESVESHIKREAADEQRTAIFNSVMAGLPKNKALPDWERPIVNPSAETLTPYSQYRTKEGEEALSNTEMLDWLAKAVDLDERKIRIIKEQITWWDAMGDDLRSPMLSFGSGKVRGGRLGRDHTFEDVPNHYVRDKLMDYTLSEVNRYKYTKGHLALCSDLTERETIEYIHEIIRIREKMDKDGMSDEEACKSRWFQTKGAKGGKKKAVTANGKRTRKGREGQSIGNGNGIDPMSRKQEAGETTDNIVDSSSIIFQARNGNGGRKRRSDVDDENEKETDRLTRSKSNRAKVPKLS

SEQ ID NO: 39718 - DNA, 612 bp, Muscodor strobelii
  misc_feature: SGI cDNA ID NO. 573830
  misc_feature: Encodes the peptide sequence at SEQ ID NO 39719
atggcgtatgtcagtcttgacgatgccgtcttttggacccctccgccaacagcaggtttaaggcctgcgcaccaaaatcttaagagaccaagcgtcccgcattctgcaacttcttccaagaaccagagtacgccttgggtagagagcagggcgcaagatgctaaatctctaagggatgtcacaagcaagcctatttttatcgacgacgagagcagcgatggagaggatagggacgataagaccgatgcccaatccgacatatcaagcaacaccatggatccgtgcaacccgagtactgctttcgagggggttaacataggagaactgccccctacagaggcggccatgctcccgagactgtcgacaccagagacgagcaagaggtaccggaacccgcaatggaagatgggttactcggattgcacgggaatagaccacaaaaccccagctaccacctacggcaatgcgatgaggatacttgtcaagaaggcagaccatgtgattggtgcactcgattcccaagactatctgcgatgttcgaacgcctccgtgggaaacccgccacccgtagggagacgagcggagaagctaaatcgctggaggtcgaggtag

SEQ ID NO: 39719 - protein, 203 aa, Muscodor strobelii
  misc_feature: SGI Peptide ID NO. 573830
MAYVSLDDAVFWTPPPTAGLRPAHQNLKRPSVPHSATSSKNQSTPWVESRAQDAKSLRDVTSKPIFIDDESSDGEDRDDKTDAQSDISSNTMDPCNPSTAFEGVNIGELPPTEAAMLPRLSTPETSKRYRNPQWKMGYSDCTGIDHKTPATTYGNAMRILVKKADHVIGALDSQDYLRCSNASVGNPPPVGRRAEKLNRWRSR

SEQ ID NO: 39720 - DNA, 1548 bp, Muscodor strobelii
  misc_feature: SGI EST ID NO. CUFF.95944.0
  misc_feature: Variant of the nucleotide sequence at SEQ ID NO 39718
agtgggagcggcgcgttggagggacgagcttgctaagccgccctgtctcctttctaccccatcagagatgtgataggcagagtggctcgtcgtctgatcctgcaactgcaactgcaactgcaacctgatcgggggagtggacgaggtctacaagagcgccaggagagtctgcgccttgttttccgacttgtctagccgcttttaggccatgtttggaaataccgaaggtgccgcgttttaacccgagcaagtaattcgcgacaagggcgaggaagagttaattgcgcctctaaccgcgtcgggctggttccatgggtgaatgattggcagacgtacgagagaagagtgactggtatactgaggagctcctggctccagcgggaaatccgcagacgaatacgccccttgccactcttttggaagcggaatgccttgtgcctggaatttgtcttcaaaccaatatgggcgaaacacatatatttctccggaatccgcccttacaactcgagcagcatccttctgcatcgtccacctttgggaaaaccttattcactataccttctgctcccatttactcaacacaatggcgtatgtcagtcttgacgatgccgtcttttggacccctccgccaacagcaggtttaaggcctgcgcaccaaaatcttaagagaccaagcgtcccgcattctgcaacttcttccaagaaccagagtacgccttgggtagagagcagggcgcaagatgctaaatctctaagggatgtcacaagcaagcctatttttatcgacgacgagagcagcgatggagaggatagggacgataagaccgatgcccaatccgacatatcaagcaacaccatggatccgtgcaacccgagtactgctttcgagggggttaacataggagaactgccccctacaggtatggcagaaccgacccaacatatggcatcgagcaaagagccaccgtgccaaacctcggaaaatacaactgccttaattcctatgtccggccaatcgcaccacccggccggggagtggtcgtctccctctccaacgcctcttcagacggatcaatctacaatacaccaggcggaggatcttatatacagaggcggccatgctcccgagactgtcgacaccagagacgagcaagaggtaccggaacccgcaatggaagatgggttactcggattgcacgggaatagaccacaaaaccccagctaccacctacggcaatgcgatgaggatacttgtcaagaaggcagaccatgtgattggtgcactcgattcccaagactatctgcgatgttcgaacgcctccgtgggaaacccgccacccgtagggagacgagcggagaagctaaatcgctggaggtcgaggtagaatcccaccttgacaagactgctcttgactctatctgcctgccacacgggccactctacccctctgaagatgagcgtgaaacagagcatgagcatggcggcggccagccgccaacacatcgtggccacggaaatgataatacgaatgatccaggacccctttg

SEQ ID NO: 39721 - DNA, 384 bp, Muscodor strobelii
  misc_feature: SGI cDNA ID NO. 573831
  misc_feature: Encodes the peptide sequence at SEQ ID NO 39722
atgtatctccccagcacccaaagcgtcataaccgctgggctattgctcacaggcacccttagaaaaccatcggaagtagccttcggcaaagtaatggactacgcaatcgagaagtgcctcgacgacgacggcaatacgcgctgtaccaagcccttcctcgttacgaagtcgacatgctacaagatcgaatggagcaccgaaggtacgcttacgcacaccactgctgaagtacgtgatgttggatcgggcgaactcgtgtactaccgcgataccgacggcgattggacaactgaaaagggagagcttgtgtacttggacttcaagcctaaggtcccggctattggcaattcgactgttgagtataaggttacgacatgcgaataa

SEQ ID NO: 39722 - protein, 127 aa, Muscodor strobelii
  misc_feature: SGI Peptide ID NO. 573831
  misc_feature (1)..(127): NCBI GI: 154304170 Blast Desc: BC1G_08355 [Botryotinia fuckeliana B05.10] gi|150854157|gb|EDN29349.1| BC1G_08355 [Botryotinia fuckeliana B05.10]
  misc_feature (1)..(127): NCBI GI: 58266208 Blast Desc: [Cryptococcus neoformans var. neoformans JEC21] gi|134111172|ref|XP_775728.1| CNBD4570 [Cryptococcus neoformans var. neoformans B-3501A] gi|50258392|gb|EAL21081.1| CNBD4570 var.
  misc_feature (1)..(127): NCBI GI: 269856954 Blast Desc: CND01770-like protein [Cryptococcus heveanensis]
MYLPSTQSVITAGLLLTGTLRKPSEVAFGKVMDYAIEKCLDDDGNTRCTKPFLVTKSTCYKIEWSTEGTLTHTTAEVRDVGSGELVYYRDTDGDWTTEKGELVYLDFKPKVPAIGNSTVEYKVTTCE

SEQ ID NO: 39723 - DNA, 787 bp, Muscodor strobelii
  misc_feature: SGI EST ID NO. CUFF.95911.0
  misc_feature: Variant of the nucleotide sequence at SEQ ID NO 39721
gttatattttacattttgatcaaacgaattgctggaaagaattgctactttggaatatctcacaatcgaaactcaaaattgttaagcaatcgcaccaccatcaccttcttcaacccgccgacaagatgtatctccccagcacccaaagcgtcataaccgctgggctattgctcacaggcacccttagaaaaccatcggaagtagccttcggcaaagtaatggactacgcaatcgagaagtgcctcgacgacgacggcaatacgcgctgtaccaagcccttcctcgttacgaagtcgacatgctacaagatcgaatggagcaccgaaggtacgcttacgcacaccactgctgaagtacgtgatgttggatcgggcgaactcgtgtactaccgcgataccgacggcgattggacaactgaaaagggagagcttgtgtacttggacttcaagcctaaggtcccggctattggcaattcgactgttgagtataaggttacgacatgcgaataatgattgcatttaatgcgtttggagtcagagggcgaaatgataagcatgatggaaagaaataattgtactattacacctcgggagaaacaatatggctatggcgctcggcgtataatgtaatgctcctaagcgacagggtgggattgcgatactactacacgtaagaatggagccttcagtgtacacccagaatgagtacttctaaattgcattgtcatcacatttcgtatctgatcttaatcataggcgcaggcgtgaaatagagattgaacaatcaa

SEQ ID NO: 39724 - DNA, 900 bp, Muscodor strobelii
  misc_feature: SGI cDNA ID NO. 573832
  misc_feature: Encodes the peptide sequence at SEQ ID NO 39725
atgttcgttacttgggttttctacgacaagatgggtgtgcgacgaactttgcgggggctgacggctcaagtcgagaagacggttctatggctcggcgcatgctggaccggcgcgctcacaaattacacattggatttcatccccatccagaggttgacgggacacgatcttgagcaacagcccggtgcgaaagcggctttgtcaatcattgttattgtcctagtcgtggtcgtcgtgggacagatatggtgtttccagagagaggctcggctcgtgcgctacttgggactttacgccttatttatcttggctattctcatcgcattggccctgcctagcctcaatttacgcattcatcactatatactcgccttattactcatacctggcacgagtattcaaacgcggccgtcgctattataccaaggtcttcttgttggtctcttcatcaacggtattgctcgatggggcttcgattcagtactgcagacttcgtctgcattacaaggagatgcgcaactcggcactgcgttgcctgtcctccttactcctgttgtcaacacaaccttgtctcagatcgcattccagtggcagtcagcacctgagatacgctacgacggcataagcatcttggtcaacgacgtagaacgatatcgtgcgtatttcggcgacaacggaagcgatgaattcgtttggtcacgcgagaatgagacgtcaattaatgagtactttcgatttggatacatgcagggtgcgaattctggcgactatacacaggcaggcacgtgggataccgacatgaagtggattgagatagcgagcgggccgtctaaaatcaagggtcgaaatcttttgcaaacggaacaacaggttcctagaccattgcgaaatcatagatga

SEQ ID NO: 39725 - protein, 299 aa, Muscodor strobelii
  misc_feature: SGI Peptide ID NO. 573832
  misc_feature (1)..(284): NCBI GI: 256730930 Blast Desc: NECHADRAFT_63445 [Nectria haematococca mpVI 77-13-4]
  misc_feature (1)..(288): NCBI GI: 46125991 Blast Desc: FG07373.1 [Gibberella zeae PH-1]
  misc_feature (1)..(288): NCBI GI: 261355543 Blast Desc: LCCL domain-containing protein [Verticillium albo-atrum VaMs.102]
  misc_feature (1)..(290): NCBI GI: 85092038 Blast Desc: NCU04653 [Neurospora crassa OR74A] gi|21622320|emb|CAD37023.1| conserved [Neurospora crassa] gi|28920598|gb|EAA29960.1| conserved [Neurospora crassa OR74A]
  misc_feature (1)..(283): NCBI GI: 116206710 Blast Desc: CHGG_02648 [Chaetomium globosum CBS 148.51] gi|88183245|gb|EAQ90713.1| CHGG_02648 [Chaetomium globosum CBS 148.51]
  misc_feature (1)..(284): NCBI GI: 39972353 Blast Desc: MGG_07478 [Magnaporthe grisea 70-15] gi|145016666|gb|EDK01096.1| MGG_07478 [Magnaporthe grisea 70-15]
  misc_feature (2)..(284): NCBI GI: 156063096 Blast Desc: SS1G_01664 [Sclerotinia sclerotiorum 1980] gi|154697000|gb|EDN96738.1| SS1G_01664 [Sclerotinia sclerotiorum 1980]
  misc_feature (2)..(284): NCBI GI: 154293045 Blast Desc: BC1G_14789 [Botryotinia fuckeliana B05.10] gi|150845693|gb|EDN20886.1| BC1G_14789 [Botryotinia fuckeliana B05.10]
  misc_feature (1)..(277): NCBI GI: 171692237 Blast Desc: protein product [Podospora anserina] gi|170946067|emb|CAP72868.1| protein product [Podospora anserina]
  misc_feature (2)..(277): NCBI GI: 189209806 Blast Desc: LCCL domain containing protein [Pyrenophora tritici-repentis Pt-1C-BFP] gi|187977328|gb|EDU43954.1| LCCL domain containing protein [Pyrenophora tritici-repentis
MFVTWVFYDKMGVRRTLRGLTAQVEKTVLWLGACWTGALTNYTLDFIPIQRLTGHDLEQQPGAKAALSIIVIVLVVVVVGQIWCFQREARLVRYLGLYALFILAILIALALPSLNLRIHHYILALLLIPGTSIQTRPSLLYQGLLVGLFINGIARWGFDSVLQTSSALQGDAQLGTALPVLLTPVVNTTLSQIAFQWQSAPEIRYDGISILVNDVERYRAYFGDNGSDEFVWSRENETSINEYFRFGYMQGANSGDYTQAGTWDTDMKWIEIASGPSKIKGRNLLQTEQQVPRPLRNHR

SEQ ID NO: 39726 - DNA, 256 bp, Muscodor strobelii
  misc_feature: SGI EST ID NO. CUFF.95914.0
  misc_feature: Variant of the nucleotide sequence at SEQ ID NO 39724
gccttgcctaatgctgggcccgcgttcgggggtatatatcggtcatacttatagtgaaggaaagttttataacttaatgcgttcaaaagtgagcaagacgcgacttgacgcgtcgcatcaccactagtggttcgtaatagggatgtggattcctgcccgctatgttcgttacttgggttttctacgacaagatgggtgtgcgacgaactttgcgggggctgacggctcaagtcgagaagacggttctatggctcgg

SEQ ID NO: 39727 - DNA, 444 bp, Muscodor strobelii
  misc_feature: SGI cDNA ID NO. 573833
  misc_feature: Encodes the peptide sequence at SEQ ID NO 39728
atgttcaacgatttaactatgtctggcctaacccctgcttcatccatacctcgcgtcgggaagcttcgtgagcaactaggctacaaagatactgtttctcatagtctgtcccccgcgttctcagactctatttgcgtgcatcttaagaaattcctgaaagccaaaggactggaaagcaacaccaccccttggaaatgggcaagcaaagaggcccaaggaatgatcggagagatcgtccaggggttcttcaaggaacatggcaaagtcttctggccagatatccgtacagagcgaggtgtggtacgcatgaaatacacctcggataaggacatctatttgaacaatgagatcgtcgagatcggaatgaccatcacttcaagggacaaagatctcgacgtggtagaaggcgacgaggaccgactacatcgtaccgctaccatctaa

SEQ ID NO: 39728 - protein, 147 aa, Muscodor strobelii
  misc_feature: SGI Peptide ID NO. 573833
MFNDLTMSGLTPASSIPRVGKLREQLGYKDTVSHSLSPAFSDSICVHLKKFLKAKGLESNTTPWKWASKEAQGMIGEIVQGFFKEHGKVFWPDIRTERGVVRMKYTSDKDIYLNNEIVEIGMTITSRDKDLDVVEGDEDRLHRTATI

SEQ ID NO: 39729 - DNA, 927 bp, Muscodor strobelii
  misc_feature: SGI cDNA ID NO. 573834
  misc_feature: Encodes the peptide sequence at SEQ ID NO 39730
atgtcaaaaccttctacaactatggacatgtcacagcatacctacgtgcccaactatccaccgcagtcgagtttctccatggaggggatggatgattccgacaatggtaataccgggttgaccggggagaagaagagaaataggcttggatatgcacgatccaacatggcttgcggaaactgttggaagaggaagatcagatgccaagcaatcaagaacgacgatcgttgctaccaatgcatcagattaaagaagccctgcgcgtattacgctgtagatcaaggaccgacagatccgtcaatcgtgaagcatggacagaggccagatacgagagcagtgcttgcatcaacagtgacgtcgcccccaatagtatctagtcatttggtagatgtgcgagaagctcaatctttccaaaaatcacctatacaagcgggccaagtcatgaggccatcaacgctgcgaccagaggcatatttggatgatccgaaagatccacagagcatggctcatgttagatcctatctgtatggccaaagcataggtaactggattccggcggatatcagctctggtatagcaaagtcaaacgatatggctggttggaggaactaccctcccgaatccccagcgactcctggctttggtcagtatcctggcccaccacctccaacaagcgcgacctgggcagcaacttcgtctctggaagctgtttcgtgccctgaagaaacctggacgtcctatcaaacaccgatgaggtcaatgccattcggcggggaagaagtggcgcagaattccaacgataggaagtcgcccattgcctcagatatgtatcagccaacaagcattggaagcgtctcgccaacttcgcacgcagggtggcaacaaccgtaccatcagttgtggtacgtaaaaggtggtcgaccatag

SEQ ID NO: 39730 - protein, 308 aa, Muscodor strobelii
  misc_feature: SGI Peptide ID NO. 573834
  misc_feature (39)..(265): NCBI GI: 171687575 Blast Desc: protein product [Podospora anserina] gi|170943749|emb|CAP69401.1| protein product [Podospora anserina]
  misc_feature (35)..(150): NCBI GI: 261189231 Blast Desc: C6 finger domain-containing protein [Ajellomyces dermatitidis SLH14081] gi|239591812|gb|EEQ74393.1| C6 finger domain-containing protein [Ajellomyces dermatitidis SLH14081]
  misc_feature (35)..(150): NCBI GI: 239614729 Blast Desc: C6 finger domain-containing protein [Ajellomyces dermatitidis ER-3]
  misc_feature (32)..(277): NCBI GI: 156061415 Blast Desc: SS1G_02851 [Sclerotinia sclerotiorum 1980] gi|154700254|gb|EDN99992.1| SS1G_02851 [Sclerotinia sclerotiorum 1980]
  misc_feature (39)..(162): NCBI GI: 240280319 Blast Desc: C6 finger domain-containing protein [Ajellomyces capsulatus H143]
  misc_feature (39)..(162): NCBI GI: 225561124 Blast Desc: conserved [Ajellomyces capsulatus G186AR]
  misc_feature (37)..(137): NCBI GI: 238840494 Blast Desc: conserved [Microsporum canis CBS 113480]
  misc_feature (31)..(220): NCBI GI: 154313815 Blast Desc: BC1G_05757 [Botryotinia fuckeliana B05.10] gi|150849339|gb|EDN24532.1| BC1G_05757 [Botryotinia fuckeliana B05.10]
  misc_feature (148)..(306): NCBI GI: 85091961 Blast Desc: NCU09214 [Neurospora crassa OR74A] gi|28920559|gb|EAA29922.1| [Neurospora crassa OR74A]
  misc_feature (37)..(142): NCBI GI: 226277861 Blast Desc: conserved [Paracoccidioides brasiliensis Pb01]
MSKPSTTMDMSQHTYVPNYPPQSSFSMEGMDDSDNGNTGLTGEKKRNRLGYARSNMACGNCWKRKIRCQAIKNDDRCYQCIRLKKPCAYYAVDQGPTDPSIVKHGQRPDTRAVLASTVTSPPIVSSHLVDVREAQSFQKSPIQAGQVMRPSTLRPEAYLDDPKDPQSMAHVRSYLYGQSIGNWIPADISSGIAKSNDMAGWRNYPPESPATPGFGQYPGPPPPTSATWAATSSLEAVSCPEETWTSYQTPMRSMPFGGEEVAQNSNDRKSPIASDMYQPTSIGSVSPTSHAGWQQPYHQLWYVKGGRP

SEQ ID NO: 39731 - DNA, 1008 bp, Muscodor strobelii
  misc_feature: SGI cDNA ID NO. 573835
  misc_feature: Encodes the peptide sequence at SEQ ID NO 39732
atgatagagcaagcccccgtcgcaactgcgactgtcaccaatgggttcaaatctttcaagacgatgccttttgccgagcattttaacaagctccaaatccctgccacagcactcaccatacgcacccatccactcacagacaaggtagccgatgccgtaaatcagttctttattgatacttggccgttccagggcgaaagggagcgcaagaagtttctcggtgcagattttccccgatttgtctgttactatttcccaaatgccctagaggaccgtctacggctggtttgcgaagtagttacacatctcttcatcgtcgacgatatcattgaagcaatgtcgctcaaagatggacgggcatttaatgataaattgattgctctcgcacgtggcgatgtacaacccgatcgtagctcgcctccagaatggattatgtatgatgtctggcagggtatgcgaaagtgtgacaaagagctggccaatgcaatgttacagccctgttttgacttcatgaactcccaaacggatccgaggcgcctgaccaaaatgaacttggaacaatatctcgaatatcgtctagacgatgtcggcaaggagtttctaagcgctctcatctgcttcacgcaatctctccacttgactaaagaagagtgggcgatggtggaccccgtagacaagaactccgcaaggcacatatcggtgatcaacgacatatggagttatgacaaggagctacgagccgctgccacgcttaatcaggagggtgccacgatgctcaacgccgttgatattctggccgatgaggcgtcgatgcctgccgaaagcgccaaacgtgtcttataccagctgtgtcgtgagtgggaaatcgtacacgagacgctcgtcgctgagatcctcgccaaacatgactctcgccagttgcgggcttacttcaaagagacagagtatcagatgagtggcaacgaaatttggagccggatcacattgcgttactcgcagattcattga

SEQ ID NO: 39732 - protein, 335 aa, Muscodor strobelii
  misc_feature: SGI Peptide ID NO. 573835
  misc_feature (26)..(331): NCBI GI: 171677181 Blast Desc: protein product [Podospora anserina] gi|170936658|emb|CAP61317.1| protein product [Podospora anserina]
  misc_feature (34)..(331): NCBI GI: 169782654 Blast Desc: [Aspergillus oryzae RIB40] gi|83774533|dbj|BAE64656.1| protein product [Aspergillus oryzae]
  misc_feature (34)..(332): NCBI GI: 255931833 Blast Desc: Pc12g06310 [Penicillium chrysogenum Wisconsin 54-1255] gi|211582092|emb|CAP80258.1| Pc12g06310 [Penicillium chrysogenum Wisconsin 54-1255]
  misc_feature (34)..(332): NCBI GI: 416643 Blast Desc: ARIS_PENRO RecName: Full=Aristolochene synthase; Short=AS; AltName: Full=Sesquiterpene cyclase gi|169178|gb|AAA33694.1| aristolochene synthase [Penicillium
  misc_feature (34)..(328): NCBI GI: 10120633 Blast Desc: ARIS_PENRO RecName: Full=Aristolochene synthase; Short=AS; AltName: Full=Sesquiterpene cyclase gi|169178|gb|AAA33694.1| aristolochene synthase [Penicillium
  misc_feature (34)..(322): NCBI GI: 224589059 Blast Desc: FPP cyclase [Penicillium expansum]
  misc_feature (43)..(331): NCBI GI: 121712471 Blast Desc: terpene synthase metal binding domain protein [Aspergillus clavatus NRRL 1] gi|119401999|gb|EAW12421.1| terpene synthase metal binding domain protein [Aspergillus clavatus NRRL
  misc_feature (43)..(331): NCBI GI: 67525639 Blast Desc: AN3277.2 [Aspergillus nidulans FGSC A4] gi|40744065|gb|EAA63245.1| AN3277.2 [Aspergillus nidulans FGSC A4] gi|259485756|tpe|CBF83046.1| TPA: conserved [Aspergillus FGSC
  misc_feature (11)..(333): NCBI GI: 169603596 Blast Desc: SNOG_04807 [Phaeosphaeria nodorum SN15] gi|111066078|gb|EAT87198.1| SNOG_04807 [Phaeosphaeria nodorum SN15]
  misc_feature (34)..(331): NCBI GI: 121708682 Blast Desc: conserved [Aspergillus clavatus NRRL 1] gi|119400361|gb|EAW10787.1| conserved [Aspergillus clavatus NRRL 1]
  misc_feature (34)..(332): SWISSPROT Homolog: EC 4.2.3.9 Aristolochene synthase
MIEQAPVATATVTNGFKSFKTMPFAEHFNKLQIPATALTIRTHPLTDKVADAVNQFFIDTWPFQGERERKKFLGADFPRFVCYYFPNALEDRLRLVCEVVTHLFIVDDIIEAMSLKDGRAFNDKLIALARGDVQPDRSSPPEWIMYDVWQGMRKCDKELANAMLQPCFDFMNSQTDPRRLTKMNLEQYLEYRLDDVGKEFLSALICFTQSLHLTKEEWAMVDPVDKNSARHISVINDIWSYDKELRAAATLNQEGATMLNAVDILADEASMPAESAKRVLYQLCREWEIVHETLVAEILAKHDSRQLRAYFKETEYQMSGNEIWSRITLRYSQIH

SEQ ID NO: 39733 - DNA, 160 bp, Muscodor strobelii
  misc_feature: SGI EST ID NO. CUFF.95993.0
  misc_feature: Variant of the nucleotide sequence at SEQ ID NO 39731
tgattgctctcgcacgtggcgatgtacaacccgatcgtagctcgcctccagaatggattatgtatgatgtctggcagggtatgcgaaagtgtgacaaagagctggccaatgcaatgttacagccctgttttgacttcatgaactcccaaacggatccgag

SEQ ID NO: 39734 - DNA, 1575 bp, Muscodor strobelii
  misc_feature: SGI cDNA ID NO. 573836
  misc_feature: Encodes the peptide sequence at SEQ ID NO 39735
atgtcgcttaatggcaagatgcacaactcatcatcgttggaaccattgctccacggcaacatattcttgtcagactgggctactctcaactatgccataagcttttgcctcgctctgacctgtctcctctggggtctatggtcgcaaaatgctaagccagcattgatccctggcgtctatgtcgtggggggatcgaagaaaagcgagatcaaggcaaccagtcagaagttcaagtttgaatctaaaacgcttatccacaatggctacgtgcatacagagggcaaggaacctttttacgttccttcgaatcaaggcccgcgcttgatcattcccacacgctatatggaagaacttaaatcagcacctatagacaaggtggatttcatagggacggttcatgagagtacgctcgtcctcacagtgttcgagtacgattacactggcgtggttcatccatcacgcatggtgccaagcactctggtttcgcacctcacgccacgccttggaaatataatgccagatgtacaagatgagatgaagctcgccattactgaagaattcccaccatgtgacgactggacagaagtagacattatggatggcatgactagggttatcacacgggcaacgtcacgcatggcaggtggaaaaacattgagtcaagatagagagtggatcactgctgcaataaagtacgccctttgggcatttacagcagctcagaaaattaagaagatcccaacgccattgaggcgcatcatcggaccgtggctatcagaggttcgcaaagatattccgtggtcgttctctgaggcggctcgtgtagcagttccgctactggaggagcgggagcgcacaggagaagaagccaatgactttctgcagtggctaaagagcaccgcaaagggtcctgagaaggaagataaatttatctctcatctcctggtcatggtggcttttgcgtctatccataccagcgtagcgactattggggggctcgtgttcgatctttgccaataccccaagctggtggatatcatccgagaggagtacgagggtgttgtggacgagaatgggaacattcccaagaatggattcgcaaagctggtcaaaatggatagtatcatgaaagagagccaaaggctcaatcctattactcttttgacttttgaacgcatcatccgggaagaaagaatactgaaagatgggtttagaattccagctggtactcagattggagtcccaaactacgacattgcaatggaccctcaagtatatcctgaccctgaaaggtttgatcccttacgttttgaaaaacttcgccgagatcctgtatgggcaaataagtcccagtttgtctcaagcaatccccatagtctatcatttggttatggccgtcacgcttgccctggtcgtcagttcatggaccaagaattcaaatcattcttggtcaagcttctcagcaccttcgatctcaagtttaaggagggccaggctagagtgcccaacgctccacttgagtcacaatatatactacatcatgtagctgttctgcttaagcgtcgtaagctttaa

SEQ ID NO: 39735 - protein, 524 aa, Muscodor strobelii
  misc_feature: SGI Peptide ID NO. 573836
  misc_feature (53)..(521): Pfam Id: PF00067 Pfam Desc: Cytochrome P450
  misc_feature (372)..(521): Pfam Id: PF00067 Pfam Desc: Cytochrome P450
  misc_feature (141)..(523): NCBI GI: 238492293 Blast Desc: cytochrome P450, [Aspergillus flavus NRRL3357] gi|220695877|gb|EED52219.1| cytochrome P450, [Aspergillus flavus NRRL3357]
  misc_feature (37)..(523): NCBI GI: 67525633 Blast Desc: AN3274.2 [Aspergillus nidulans FGSC A4] gi|40744062|gb|EAA63242.1| AN3274.2 [Aspergillus nidulans FGSC A4]
  misc_feature (42)..(523): NCBI GI: 259485760 Blast Desc: TPA: cytochrome P450, (Eurofung) [Aspergillus nidulans FGSC A4]
  misc_feature (141)..(523): NCBI GI: 169782648 Blast Desc: [Aspergillus oryzae RIB40] gi|83774530|dbj|BAE64653.1| protein product [Aspergillus oryzae]
  misc_feature (48)..(474): NCBI GI: 121712463 Blast Desc: cytochrome P450 [Aspergillus clavatus NRRL 1] gi|119401995|gb|EAW12417.1| cytochrome P450 [Aspergillus clavatus NRRL 1]
  misc_feature (74)..(523): NCBI GI: 258578343 Blast Desc: conserved [Uncinocarpus reesii 1704] gi|237903619|gb|EEP78020.1| conserved [Uncinocarpus reesii 1704]
  misc_feature (74)..(523): NCBI GI: 240108704 Blast Desc: Cytochrome P450 family protein [Coccidioides posadasii C735 delta SOWgp]
  misc_feature (98)..(524): NCBI GI: 119494789 Blast Desc: cytochrome P450 monooxygenase, [Neosartorya fischeri NRRL 181] gi|119412362|gb|EAW22303.1| cytochrome P450 monooxygenase, [Neosartorya fischeri NRRL 181]
  misc_feature (85)..(524): NCBI GI: 259486929 Blast Desc: TPA: cytochrome P450, (Eurofung) [Aspergillus nidulans FGSC A4]
  misc_feature (85)..(524): NCBI GI: 67522282 Blast Desc: AN1598.2 [Aspergillus nidulans FGSC A4] gi|40745149|gb|EAA64305.1| AN1598.2 [Aspergillus nidulans FGSC A4]
  misc_feature (76)..(523): SWISSPROT Homolog: EC 1.14.13.78 Ent-kaurene oxidase
MSLNGKMHNSSSLEPLLHGNIFLSDWATLNYAISFCLALTCLLWGLWSQNAKPALIPGVYVVGGSKKSEIKATSQKFKFESKTLIHNGYVHTEGKEPFYVPSNQGPRLIIPTRYMEELKSAPIDKVDFIGTVHESTLVLTVFEYDYTGVVHPSRMVPSTLVSHLTPRLGNIMPDVQDEMKLAITEEFPPCDDWTEVDIMDGMTRVITRATSRMAGGKTLSQDREWITAAIKYALWAFTAAQKIKKIPTPLRRIIGPWLSEVRKDIPWSFSEAARVAVPLLEERERTGEEANDFLQWLKSTAKGPEKEDKFISHLLVMVAFASIHTSVATIGGLVFDLCQYPKLVDIIREEYEGVVDENGNIPKNGFAKLVKMDSIMKESQRLNPITLLTFERIIREERILKDGFRIPAGTQIGVPNYDIAMDPQVYPDPERFDPLRFEKLRRDPVWANKSQFVSSNPHSLSFGYGRHACPGRQFMDQEFKSFLVKLLSTFDLKFKEGQARVPNAPLESQYILHHVAVLLKRRKL

SEQ ID NO: 39736 - DNA, 1353 bp, Muscodor strobelii
  misc_feature: SGI cDNA ID NO. 573837
  misc_feature: Encodes the peptide sequence at SEQ ID NO 39737
atgttcctcagctggaagcagtctggcgatgggagcggtgccacacatacaagacttccaattgcttttgatccagtcacagcaaagacacaaagcccccaagcctgtgcagcctgccgtgcgcgaaaggtcaagtgcatctgggatggtggtggctgcgagcgttgcaaggcgtcaggccgcgagtgcatatatgaggcctcaaacactagaggggctggcgccacgcggcggaggtctagagaagctggaatgaaccatgattctggcaccaagaggttaaagaggccagtggcgacatcaacaactccagttgagtccattgacgttacaaagtcgtcccagacagaggaatctgaagaaccacccgtcccggacccagtgtctatcgcacagcagcctagcgggctctcatccgatgcacgtgaaatgtatgtgtcgagcgcgaaagacccattcacggacgaaactatggacgccagtagaatggacatgagcaacgacctagaagtcaatacctccggttcgttgataacaacaagagacatggatttgagtatttccacagacatcttatccgagcatgacacaatgtgggaagatatgatcagcgagccatggacaggagaaccgtggtcggttgcaacgctcgcgacaatgtcaatgcctacacctgtatctccactgaggccggaaacggaaaatcagctttcgaataagacccaatgtcaatgtctacgtaaactcgtcatgctggtagacgagatcgagtgtatagtgcaaagagatggactcaagtccccagacgtggctttgaccgctaataaggaggctctgggctgcgccgtcgaaatgatgggctgcgctaattgcactggccgggttgagaatatgattattcttactcttatggccgatagccttgttcgtatgtgcagtcaagtagccgaagcttgttgcgtgggacttcgacttggccatggtcagaaaagagacagcgccaataacgggccgtctaatatgacaacgccgcgactgtccctccagagtagttgtgacgacgctaccaacgatggcttgggacagttccgatcccctgtgggaattggttcaccatcgagagtatacaatgtcgaatcgtctactgagtacttcttcatcatggcgggcatcttgcgttttcagctactagaactctttgacctaacgcaacaattacgaatagttgttgcgccgcttgcaacggacactgtcagtcaaagacttgcggcatgtagcgatgcggtgaaagacctgctgatcaaggctgggctgactccacctgatgttcccgaggaagcggatattgggtag

SEQ ID NO: 39737 - protein, 450 aa, Muscodor strobelii
  misc_feature: SGI Peptide ID NO. 573837
  misc_feature (34)..(72): Pfam Id: PF00172 Pfam Desc: Fungal Zn(2)-Cys(6) binuclear cluster domain
  misc_feature (36)..(315): NCBI GI: 240106732 Blast Desc: Fungal Zn binuclear cluster domain containing protein [Coccidioides posadasii C735 delta SOWgp]
  misc_feature (25)..(78): NCBI GI: 134114852 Blast Desc: CNBH1790 [Cryptococcus neoformans var. neoformans B-3501A] gi|50256352|gb|EAL19077.1| CNBH1790 [Cryptococcus neoformans var. neoformans B-3501A]
  misc_feature (1)..(71): NCBI GI: 46109574 Blast Desc: FG01669.1 [Gibberella zeae PH-1]
  misc_feature (25)..(78): NCBI GI: 58271660 Blast Desc: prib protein [Cryptococcus neoformans var. neoformans JEC21] gi|57229245|gb|AAW45679.1| prib protein, [Cryptococcus neoformans var. neoformans JEC21]
  misc_feature (1)..(65): NCBI GI: 256730738 Blast Desc: NECHADRAFT_29856 [Nectria haematococca mpVI 77-13-4]
  misc_feature (237)..(450): NCBI GI: 67525645 Blast Desc: AN3280.2 [Aspergillus nidulans FGSC A4] gi|40744068|gb|EAA63248.1| [Aspergillus nidulans FGSC A4]
  misc_feature (237)..(450): NCBI GI: 259485753 Blast Desc: TPA: Zn(II)2Cys6 transcription factor (Eurofung) [Aspergillus nidulans FGSC A4]
  misc_feature (234)..(432): NCBI GI: 121712477 Blast Desc: C6 zinc finger domain protein [Aspergillus clavatus NRRL 1] gi|119402002|gb|EAW12424.1| C6 zinc finger domain protein [Aspergillus clavatus NRRL 1]
  misc_feature (243)..(316): NCBI GI: 121717318 Blast Desc: ACLA_076880 [Aspergillus clavatus NRRL 1] gi|119404230|gb|EAW14647.1| ACLA_076880 [Aspergillus clavatus NRRL 1]
  misc_feature (1)..(309): NCBI GI: 238483839 Blast Desc: conserved [Aspergillus flavus NRRL3357] gi|220701208|gb|EED57546.1| conserved [Aspergillus flavus NRRL3357]
MFLSWKQSGDGSGATHTRLPIAFDPVTAKTQSPQACAACRARKVKCIWDGGGCERCKASGRECIYEASNTRGAGATRRRSREAGMNHDSGTKRLKRPVATSTTPVESIDVTKSSQTEESEEPPVPDPVSIAQQPSGLSSDAREMYVSSAKDPFTDETMDASRMDMSNDLEVNTSGSLITTRDMDLSISTDILSEHDTMWEDMISEPWTGEPWSVATLATMSMPTPVSPLRPETENQLSNKTQCQCLRKLVMLVDEIECIVQRDGLKSPDVALTANKEALGCAVEMMGCANCTGRVENMIILTLMADSLVRMCSQVAEACCVGLRLGHGQKRDSANNGPSNMTTPRLSLQSSCDDATNDGLGQFRSPVGIGSPSRVYNVESSTEYFFIMAGILRFQLLELFDLTQQLRIVVAPLATDTVSQRLAACSDAVKDLLIKAGLTPPDVPEEADIG

SEQ ID NO: 39738 - DNA, 3056 bp, Muscodor strobelii
  misc_feature: SGI EST ID NO. CUFF.96007.0
  misc_feature: Variant of the nucleotide sequence at SEQ ID NO 39736
gtctccagctagacctcctgactttacacccccaagcttgcgtcgttgtgttgaatgatccactcgaccttgggcgaataataacacagacgtgcgtatctgtagctcttgcgataagcatatcatatcattttgttccctctcttccgtgatcattacctctgtttacgcccctcacgcgcagaatatcatcaacggacttcagcaatggtgcggcgtttcagagttggtcagcttgcatcagaccgctcgcgatgacaggatttgcgacacctctcaaggcaacagcgattccttggctaaacggacctgcgctccttcgtgcttagctgcaggactttgtgtcactttagccgaagcacgatcgttgctttcaagtgatacaggacataatcacgtcaaagtctatacggcgagctacaccggagcggaagaatcggtcttatgtggcgtatttcgtgtcaagttcttgtatcatctcgcatccacaatggtcctttgtatcttggataagctgaccacctcatcaaacctagcataggactggcgaatgttcttcaggaacgctttccgggttgcaaacggcaaatctgacggcccgcaagcatgttatctattcgcaagttcaatgtcatgaagagctattacaaccctgcacctcagcgtcatccttgctcacacccactccaattgccatgtgcaatccatgtcgtaccagaccgccggcacacgttatattggtggtgcatatgtcacgccagggtcaagaggcgaggctcttgtgggctcggtgatgagccagggtcagccatgattgtatgcgttcattggttagatctgacgacaagacgtgcctcttctcactgtgcctccaaacccctctatcgaggctactgtagacgaccaagatgtcatggtccggatggaaaaacgtgaactcggattaatcgtgtatatgcactgtctcgctgccgctgacccgcgcttgtagtattgaattatcttggccatgtatagcgttcgaccgcaatactggtttggagatctggggatatatatcagaatatatcggccacataacatgaccctgactagtcatttgctcgccaagtattatcctatatgtcttaggaactcgcttaagcgcaaccaacgcgtattccctaacgatacaacacttatttgctgtttcagcgtgaaagtaaatccgactcgagtcatttaacagcgattagtgaatcctattgtatagctgtgcattccagctgatctagcttcaatgttcctcagctggaagcagtctggcgatgggagcggtgccacacatacaagacttccaattgcttttgatccagtcacagcaaagacacaaagcccccaagcctgtgcagcctgccgtgcgcgaaaggtcaagtgcatctgggatggtggtggctgcgagcgttgcaaggcgtcaggccgcgagtgcatatatgaggcctcaaacactagaggggctggcgccacgcggcggaggtctagagaagctggaatgaaccatgattctggcaccaagaggttaaagaggccagtggcgacatcaacaactccagttgagtccattgacgttacaaagtcgtcccagacagaggaatctgaagaaccacccgtcccggacccagtgtctatcgcacagcagcctagcgggctctcatccgatgcacgtgaaatgtatgtgtcgagcgcgaaagacccattcacggacgaaactatggacgccagtagaatggacatgagcaacgacctagaagtcaatacctccggttcgttgataacaacaagagacatggatttgagtatttccacagacatcttatccgagcatgacacaatgtgggaagatatgatcagcgagccatggacaggagaaccgtggtcggttgcaacgctcgcgacaatgtcaatgcctacacctgtatctccactgaggccggaaacggaaaatcagctttcgaataagacccaatgtcaatgtctacgtaaactcgtcatgctggtagacgagatcgagtgtatagtgcaaagagatggactcaagtccccagacgtggctttgaccgctaataaggaggctctgggctgcgccgtcgaaatgatgggctgcgctaattgcactggccgggttgagaatatgattattcttactcttatggccgatagccttgttcgtatgtgcagtcaagtagccgaagcttgttgcgtgggacttcgacttggccatggtcagaaaagagacagcgccaataacgggccgtctaatatgacaacgccgcgactgtccctccagagtagttgtgacgacgctaccaacgatggcttgggacagttccgatcccctgtgggaattggttcaccatcgagagtatacaatgtcgaatcgtctactgagtacttcttcatcatggcgggcatcttgcgttttcagctactagaactctttgacctaacgcaacaattacgaatagttgttgcgccgcttgcaacggacactgtcagtcaaagacttgcggcatgtagcgatgcggtgaaagacctgctgatcaaggctgggctgactccacctgatgttcccgaggaagcggatattgggtaggaatacatcttcgcgtgaagtctctacggggaggttgcatcgatttggacgaatcgtagctatacaatgcatgcatggactagcagggggtcaaatcctgtatgctgcttttaatcagcacacaatcattccccctctataagcttaatcttgtaagcctcttcggcgcggcctgctcttcaaggttccgagcagccgagcagccggactgtcatctataaatagagataagtagacgtcaactcaaggatactaacgtgttagaaacatataagtgaatgcttaaccaataatggtagactgccgagatcccagtcaacggaccgtcctcagaaggatccaaatggagcaaccgcccgcaccgtcgtcgatcaagtgacactagtcaaatcagcatgtcgacttggtggacgttcaatttcgc

SEQ ID NO: 39739 - DNA, 1548 bp, Muscodor strobelii
  misc_feature: SGI cDNA ID NO. 573838
  misc_feature: Encodes the peptide sequence at SEQ ID NO 39740
atggtcgaccgaaacagcattatctccatgcagtatcactggaatgatctggtagtgcttctagttgtggctattattggccatttgacatggtctattgcctacaatctcctcttccatccgttgcggaggtttcctggcccaatactcgcaagagctagcaacatatgcttctcgtattggttccatggaggccggcagccgtacaaaattctcgatctgcatctcaaatacggaccggtagtccgcaccgcacccaatgagctctccttcaattctgcaaagtcatggcaggacatctatggcttccgccagggacacaagacattcatcaaaggcgttttctacgaaggcggtgtgttcgcttctcgcggggtctcaagtattgataccgagcgcgatccgcaacggcatgccaacatgcgcaggctcctcgctaatgccttctcgatgacatctctgaccgagcaggaagagcttatccgtggcactatagatcgcttcatcgaagtcatcaaggccaagacgatcgaacaaaatgtggttttcgacatgacgaaggggtacgagcggatgacgttcgacatcatcggcgatctagcctttggagaaccattcggcgcattagagtcagagacgcctcatctctggattgagtcgctgctcagttctctcaacaaaggcgccctcaatgagacttcgaagcgcttccctactgtggccaagattggcatgttcgtgtttcataagcaggtctcaaagctatttgaggcagcacatcagaacgctgaatatgccatcaaggcggttgagaagcgtgtacagcgagagaccaaccgtaaagacttctacacgcgcatccttgagcagcgtgagaacgagcgtcacaaggtgtcagacttagagctagccgctcatgcttgggacttcgttgctgccggtagtgagacaacggcaacggccatgtcaaccgccacttactacctcctacgaaatcccgacttgatgaagaagctaagggatgaagtacggggagccttcataaatgcgtctggtattaagaacgcgacgacggcaccgctccgctatcttgacgcagtgtgtcgcgaggcgatgcgcgtttacccacccctaccattcgctctaccgaggctcgtgcctgacggcggtgataccatcgatggcgaatgggtgcctggaggaactgctgtttccatcatgccaactgcagcgtgtctggatccggccaatttctccgacccgtacattttcaagcctgagcgatggctgagtgtttcaccagatgagaagaacgctgatcgactagaggctagccagcctttttcaattgggcccaggggctgtatcgggatcaatttggcttggatggagctccggacaacgctggctctagtaatctggacatttgacctcgagcttgatacctcgtgcaaggacatggactggcatagagactcagagatgcattctctgtggcaaaagccacaactgctcgtgaaagcaaaattggctaagcacgatgtgtga

SEQ ID NO: 39740 - protein, 515 aa, Muscodor strobelii
  misc_feature: SGI Peptide ID NO. 573838
  misc_feature (62)..(508): Pfam Id: PF00067 Pfam Desc: Cytochrome P450
  misc_feature (134)..(508): Pfam Id: PF00067 Pfam Desc: Cytochrome P450
  misc_feature (17)..(507): NCBI GI: 259485758 Blast Desc: TPA: cytochrome P450, (Eurofung) [Aspergillus nidulans FGSC A4]
  misc_feature (18)..(507): NCBI GI: 121712467 Blast Desc: benzoate 4-monooxygenase cytochrome P450 [Aspergillus clavatus NRRL 1] gi|119401997|gb|EAW12419.1| benzoate 4-monooxygenase cytochrome P450 [Aspergillus clavatus NRRL 1]
  misc_feature (21)..(507): NCBI GI: 255931851 Blast Desc: Pc12g06400 [Penicillium chrysogenum Wisconsin 54-1255] gi|211582101|emb|CAP80267.1| Pc12g06400 [Penicillium chrysogenum Wisconsin 54-1255]
  misc_feature (12)..(457): NCBI GI: 169603624 Blast Desc: SNOG_04820 [Phaeosphaeria nodorum SN15] gi|111066091|gb|EAT87211.1| SNOG_04820 [Phaeosphaeria nodorum SN15]
  misc_feature (48)..(407): NCBI GI: 171677183 Blast Desc: protein product [Podospora anserina] gi|170936659|emb|CAP61318.1| protein product [Podospora anserina]
  misc_feature (28)..(512): NCBI GI: 259485752 Blast Desc: TPA: cytochrome P450, (Eurofung) [Aspergillus nidulans FGSC A4]
  misc_feature (20)..(507): NCBI GI: 154289577 Blast Desc: BC1G_16084 [Botryotinia fuckeliana B05.10] gi|150849019|gb|EDN24212.1| BC1G_16084 [Botryotinia fuckeliana B05.10] gi|169635728|emb|CAP58782.1| cytochrome P40 monooxygenase
  misc_feature (17)..(509): NCBI GI: 156032451 Blast Desc: SS1G_13923 [Sclerotinia sclerotiorum 1980] gi|154699325|gb|EDN99063.1| SS1G_13923 [Sclerotinia sclerotiorum 1980]
  misc_feature (35)..(513): NCBI GI: 255936151 Blast Desc: Pc13g06690 [Penicillium chrysogenum Wisconsin 54-1255] gi|211583722|emb|CAP91738.1| Pc13g06690 [Penicillium chrysogenum Wisconsin 54-1255]
  misc_feature (26)..(509): NCBI GI: 169783630 Blast Desc: [Aspergillus oryzae RIB40] gi|83775021|dbj|BAE65144.1| protein product [Aspergillus oryzae]
  misc_feature (42)..(480): SWISSPROT Homolog: EC 1.14.13.12 Benzoate 4-monooxygenase
MVDRNSIISMQYHWNDLVVLLVVAIIGHLTWSIAYNLLFHPLRRFPGPILARASNICFSYWFHGGRQPYKILDLHLKYGPVVRTAPNELSFNSAKSWQDIYGFRQGHKTFIKGVFYEGGVFASRGVSSIDTERDPQRHANMRRLLANAFSMTSLTEQEELIRGTIDRFIEVIKAKTIEQNVVFDMTKGYERMTFDIIGDLAFGEPFGALESETPHLWIESLLSSLNKGALNETSKRFPTVAKIGMFVFHKQVSKLFEAAHQNAEYAIKAVEKRVQRETNRKDFYTRILEQRENERHKVSDLELAAHAWDFVAAGSETTATAMSTATYYLLRNPDLMKKLRDEVRGAFINASGIKNATTAPLRYLDAVCREAMRVYPPLPFALPRLVPDGGDTIDGEWVPGGTAVSIMPTAACLDPANFSDPYIFKPERWLSVSPDEKNADRLEASQPFSIGPRGCIGINLAWMELRTTLALVIWTFDLELDTSCKDMDWHRDSEMHSLWQKPQLLVKAKLAKHDV

SEQ ID NO: 39741 - DNA, 1551 bp, Muscodor strobelii
  misc_feature: SGI EST ID NO. CUFF.96110.0
  misc_feature: Variant of the nucleotide sequence at SEQ ID NO 39739
cgctgatcgactagaggctagccagcctttttcaattgggcccaggggctgtatcgggatcaatttggcttggatggagctccggacaacgctggctctagtaatctggacatttgacctcgagcttgatacctcgtgcaaggacatggactggcatagagactcagagatgcattctctgtggcaaaagccacaactgctcgtgaaagcaaaattggctaagcacgatgtgtgaaatagtgtgcttctgtaatggggccgatcgggttgttatttatgtactgactgtgtgtctgctgttctataaaatgtcctagcgttatctctgtcgttcccgtatccttgaatcttacctagttctgcctgtttgtaactaaaatcacgcgggatactccgtgggcaaggccaagtgatacttgaacacattatgaggatcccattcttccttgagcgctgcaagtcgcggtagcttgtccgcacggtagatattctctagtggttcgtcgccatgagcgtagttgacgtagacagcgagcccgccctcgatatcgtcttcatatccggatgtcgcggcgaaggcagtgcgtaatttggggccgagttgcgcggcggcttcaggcgcgccgtccgtgctgtcatcgtcccaaccaaattgtagaaccagatagccctgagaatcacgccaggggtaagcggtcgcatcgtcgggcacggcgagagtcgcctctgtcgggtacgtctcggcagcaaaggcggaatttgtgcgagcacttgggtgcttatcgaagaagtccgccatcttggcaaactgcgcttcccacgtctgcgggtcaaaacgcttgatactggccgtgtagatgtcgcgtttgaaaccgggcacgcagttggcctcgtcagagccgaattgctgcgcgtagaatagctcgcgccattccaagtacgtgatgttgctgactgtcggctcgagtgccataatgggctcaacgacggcccttgcctcttcctcagttgcggctccgaagtactcccaattgctgacaatctgtgtgacgccagtcgttgcgttccaccctacgacggtgactatagcgagctgcgcagagtatggcatcaacgactcaatgagtttccagtagctgacgttcttctcggcggggatgatgaagtcggcattaagaccgaactgcaacacttagagtcagtagttactcgttacagcgtctttgctcatgtctcgggagtcctaagacatgtcatcagagcacttgctcctgaggctaaagaacatagctctcgaattttccagaataggcagagataaggccaaaaattgcttacgccattgctggatccaggagttggggggttcttgattttgtgcagcccatacgttgcctcgacaatcacacctaggttggctccggcacctcgaatgccccagaatagctctgaattctccgtttcactggccgtcaacacggttccattggccgcaacaaatcgaacagactgaagagcgtcgatgaagaggccgtaaataccatcccaacg

SEQ ID NO: 39742 - DNA, 1431 bp, Muscodor strobelii
  misc_feature: SGI cDNA ID NO. 573839
  misc_feature: Encodes the peptide sequence at SEQ ID NO 39743
atgatgtccaagaaaccgtttttcgcgttgtgctcgtggtttttgattccacgatgggccctcggatggaccacattcgatgaacctacctatctagctgctgtcactcctggaaatgaggaagatctcatcgaagtgttacgtgttgcaacaacaaagcatatcccctttttagtgacaagtggccgccacggatttaacccaactttgggaggagttcaaaacggtctagctatcgacttgagtcgctttgacaagcttgagatcgacacacaagcagacacattgacgatcgggccctcaatccggaccgcggacctattggatccggtgtataatgccggttatgagattcagggtggtacttgcacatgcccgagtttcattggagttacactcggtggaggtattggacgttgggatggtatttacggcctcttcatcgacgctcttcagtctgttcgatttgttgcggccaatggaaccgtgttgacggccagtgaaacggagaattcagagctattctggggcattcgaggtgccggagccaacctaggtgtgattgtcgaggcaacgtatgggctgcacaaaatcaagaaccccccaactcctggatccagcaatggcttcggtcttaatgccgacttcatcatccccgccgagaagaacgtcagctactggaaactcattgagtcgttgatgccatactctgcgcagctcgctatagtcaccgtcgtagggtggaacgcaacgactggcgtcacacagattgtcagcaattgggagtacttcggagccgcaactgaggaagaggcaagggccgtcgttgagcccattatggcactcgagccgacagtcagcaacatcacgtacttggaatggcgcgagctattctacgcgcagcaattcggctctgacgaggccaactgcgtgcccggtttcaaacgcgacatctacacggccagtatcaagcgttttgacccgcagacgtgggaagcgcagtttgccaagatggcggacttcttcgataagcacccaagtgctcgcacaaattccgcctttgctgccgagacgtacccgacagaggcgactctcgccgtgcccgacgatgcgaccgcttacccctggcgtgattctcagggctatctggttctacaatttggttgggacgatgacagcacggacggcgcgcctgaagccgccgcgcaactcggccccaaattacgcactgccttcgccgcgacatccggatatgaagacgatatcgagggcgggctcgctgtctacgtcaactacgctcatggcgacgaaccactagagaatatctaccgtgcggacaagctaccgcgacttgcagcgctcaaggaagaatgggatcctcataatgtgttcaagtatcacttggccttgcccacggagtatcccgcgtga

SEQ ID NO: 39743 - protein, 476 aa, Muscodor strobelii
  misc_feature: SGI Peptide ID NO. 573839
  misc_feature (428)..(471): Pfam Id: PF08031 Pfam Desc: Berberine and berberine like
  misc_feature (31)..(167): Pfam Id: PF01565 Pfam Desc: FAD binding domain
  misc_feature (23)..(475): NCBI GI: 39944694 Blast Desc: MGG_10961 [Magnaporthe grisea 70-15] gi|145010945|gb|EDJ95601.1| MGG_10961 [Magnaporthe grisea 70-15]
  misc_feature (23)..(475): NCBI GI: 85119269 Blast Desc: NCU02926 [Neurospora crassa OR74A] gi|28927419|gb|EAA36372.1| [Neurospora crassa OR74A]
  misc_feature (23)..(475): NCBI GI: 226885244 Blast Desc: dehydrogenase [Sordaria macrospora]
  misc_feature (23)..(475): NCBI GI: 242773402 Blast Desc: conserved [Talaromyces stipitatus ATCC 10500] gi|218721852|gb|EED21270.1| conserved [Talaromyces stipitatus ATCC 10500]
  misc_feature (23)..(466): NCBI GI: 189202842 Blast Desc: FAD binding domain containing protein [Pyrenophora tritici-repentis Pt-1C-BFP] gi|187984856|gb|EDU50344.1| FAD binding domain containing protein [Pyrenophora tritici-repentis
  misc_feature (23)..(470): NCBI GI: 212531129 Blast Desc: FAD-dependent oxidase, [Penicillium marneffei ATCC 18224] gi|210071085|gb|EEA25174.1| FAD-dependent oxidase, [Penicillium marneffei ATCC 18224]
  misc_feature (23)..(471): NCBI GI: 255948020 Blast Desc: Pc22g07580 [Penicillium chrysogenum Wisconsin 54-1255] gi|211591794|emb|CAP98046.1| Pc22g07580 [Penicillium chrysogenum Wisconsin 54-1255]
  misc_feature (23)..(471): NCBI GI: 145241722 Blast Desc: An09g01920 [Aspergillus niger] gi|134078047|emb|CAK40130.1| protein product [Aspergillus niger]
  misc_feature (23)..(464): NCBI GI: 212526012 Blast Desc: FAD binding domain protein [Penicillium marneffei ATCC 18224] gi|210072561|gb|EEA26648.1| FAD binding domain protein [Penicillium marneffei ATCC 18224]
  misc_feature (23)..(471): NCBI GI: 115390212 Blast Desc: [Aspergillus terreus NIH2624] gi|114195007|gb|EAU36707.1| [Aspergillus terreus NIH2624]
MMSKKPFFALCSWFLIPRWALGWTTFDEPTYLAAVTPGNEEDLIEVLRVATTKHIPFLVTSGRHGFNPTLGGVQNGLAIDLSRFDKLEIDTQADTLTIGPSIRTADLLDPVYNAGYEIQGGTCTCPSFIGVTLGGGIGRWDGIYGLFIDALQSVRFVAANGTVLTASETENSELFWGIRGAGANLGVIVEATYGLHKIKNPPTPGSSNGFGLNADFIIPAEKNVSYWKLIESLMPYSAQLAIVTVVGWNATTGVTQIVSNWEYFGAATEEEARAVVEPIMALEPTVSNITYLEWRELFYAQQFGSDEANCVPGFKRDIYTASIKRFDPQTWEAQFAKMADFFDKHPSARTNSAFAAETYPTEATLAVPDDATAYPWRDSQGYLVLQFGWDDDSTDGAPEAAAQLGPKLRTAFAATSGYEDDIEGGLAVYVNYAHGDEPLENIYRADKLPRLAALKEEWDPHNVFKYHLALPTEYPA

SEQ ID NO: 39744 - DNA, 4238 bp, Muscodor strobelii
  misc_feature: SGI EST ID NO. CUFF.96111.1
  misc_feature: Variant of the nucleotide sequence at SEQ ID NO 39742
ttcccattctctacaaattgtccatgtgattcaggcccggccttgacagccgctgccatgacctgactagcaccgacatcgcacgtatggccaaatatgcggtagtagatgtttattacgaagccaaggacggtgccggcggtctggcgcatgaagcctgagccgcgagtcattccgggtgtcggagcgttgagaatggcgacatcacttggaatacgccgggcgagctcagcgaggaacatcaaagcgaacagtttgctagcgctatagcgctcctccatgtcgaatcgcgctggatcctcgctgtcgaaagcggggagtaacggaacagagttgcgctcttcaagtttggtccaatgtgccataacagacgtgacgactgagatgtgcggtacagggctcttcactgccgttgctcccgaaggctttgacttgacgatgggtagtagaagtacgagtagaagcacagttgagagaaaattgacctgcatgtcaatgtcgtggccagtggacgggttgagtcctagcttagcagaaaggagaccggcattgagaacaacaatatcaggtcgctgctcgagctgccctacacgctcaacaaaggcagtaaccgaggtgtagtccaaaagatcaagcttccacacttcgacgctctgcgggccgtctttacgcgacgctagcagcgttttagctgcttcctgcccacccgcctcgttgcggacggcgaggatgagcttggctacgccgagggcgagcagctgcctgcctagctcaagaccaacgccgacattgccacccgtaacaattgccgtttgcccactgagattagcatctctcggtttcagcaagggtgctttggtctctatgacttgacttttgaggaagtgaagttggccggcctgctgctcaggcgtgatatcgaaattgtgagccatgtcgttgctctctccgattttaagtcacagatatgaaaatactgatagctactggttgtacatgaatgtcgttggccattgtaaggccgaagttatatgtacgaccaattttatacctgggtacctgagaaagcctgtgataccgcttagcgagctttgcgcagctcgaagttacgtaactttgcccttttaacaatattacagattgcgagatccaacacaagagagaatacctgtacttgggtcgccgctcaaaggcgcgcgtatcgctgataaatcagggtgtactttggcgtcgccatcttcgtgctcattggctgggggagttcctgtcgaggagctagagcgaaaaatacggtatcatacctgcgacgcacatcttcagccctcgcgaaacatgcggatggcgttctaggcttccagtcaatggcattataatcgacgacgccacattgttgatggcagatagtaacggggccggagataggtgtggttgctcgcaaccaagtgtctcacgtcagccaatgccatgcccccttggcacgttgacacaggggttaaaggtcacctaagagacccactataaatttcctaagtactggcgttttcccccttccaattctcttaatctcctgaagttcttctctttctctcccacacgatcgcatcgtcttgaacacgccccctaggtgtgcacctatttcgttaacaatgcctccgtcatctcggtcctacatgcacatcccgggatccaagcatgaatctcacgccgtctcatgatccaatgcttttttgctcgcttagagacaatcgagccaatcgcttggcatctcatatgacagttcagacaaagcattccacaccgaggttcggcacagctatcggttccggcatagcggatgctcttccaggttcagcaggccacgtgctacatgacgtgaattcatgcttatttttggtgttgggcctaatcggacaggattcgatagtttgcgatgaggctgccaatgagcaactcgcatgaccgagatacgatagcgccttgcgaaagaatgcgcctccaggatatcagcctcgaagaccgcgataatgacgctcaggaacatcgtatactaatcattcaagccaggatcgtgactgtctcagctcgtgccatgaggtgttaattataggccgacacaaattctgccttccaaattctaaaaggcattagccttttcggaagccccagtccgttggcgtcgatttcctagcccggtattgtcactagagtgatgtctatttcaggcaatcatcatgatagtagaacgcggcggttttgacgcgacgctcggggagggaacctgagctgaagggggttgctttggagagtatataatggtgtcggcgatctgctctgtcgtgagagttcatgatgccattgtagtgtatagaagactcacgtcgtgccatttcttcactttccggtgaaaatgatgtccaagaaaccgtttttcgcgttgtgctcgtggtttttgattccacgatgggccctcgggtcagtcttgagaccaaggctacaaactgaaaagacgaatttgacttcaatattatcttcaattgactggaccgacgatgatacgacattgtctttccctggtcaaccggctttctctaatgcgaccgacagatggaccacattcgatgaacctacctatctagctgctgtcactcctggaaatgaggaagatctcatcgaagtgttacgtgttgcaacaacaaagcatatcccctttttagtgacaagtggccgccacggatttaacccaactttgggaggagttcaaaacggtctagctatcgacttgagtcgctttgacaagcttgagatcgacacacaagcagacacattgacgatcgggccctcaatccggaccgcggacctattggatccggtgtataatgccggttatgagattcagggtggtacttgcacatgcccgagtttcattggagttacactcggtggaggtattggacgttgggatggtatttacggcctcttcatcgacgctcttcagtctgttcgatttgttgcggccaatggaaccgtgttgacggccagtgaaacggagaattcagagctattctggggcattcgaggtgccggagccaacctaggtgtgattgtcgaggcaacgtatgggctgcacaaaatcaagaaccccccaactcctggatccagcaatggcttcggtcttaatgccgacttcatcatccccgccgagaagaacgtcagctactggaaactcattgagtcgttgatgccatactctgcgcagctcgctatagtcaccgtcgtagggtggaacgcaacgactggcgtcacacagattgtcagcaattgggagtacttcggagccgcaactgaggaagaggcaagggccgtcgttgagcccattatggcactcgagccgacagtcagcaacatcacgtacttggaatggcgcgagctattctacgcgcagcaattcggctctgacgaggccaactgcgtgcccggtttcaaacgcgacatctacacggccagtatcaagcgttttgacccgcagacgtgggaagcgcagtttgccaagatggcggacttcttcgataagcacccaagtgctcgcacaaattccgcctttgctgccgagacgtacccgacagaggcgactctcgccgtgcccgacgatgcgaccgcttacccctggcgtgattctcagggctatctggttctacaatttggttgggacgatgacagcacggacggcgcgcctgaagccgccgcgcaactcggccccaaattacgcactgccttcgccgcgacatccggatatgaagacgatatcgagggcgggctcgctgtctacgtcaactacgctcatggcgacgaaccactagagaatatctaccgtgcggacaagctaccgcgacttgcagcgctcaaggaagaatgggatcctcataatgtgttcaagtatcacttggccttgcccacggagtatcccgcgtgattttagttacaaacaggcagaactaggtaagattcaaggatacgggaacgacagagataacgctaggacattttatagaacagcagacacacagtcagtacataaataacaacccgatcggccccattacagaagcacactatttcacacatcgtgcttagccaattttgctttcacgagcagttgtggcttttgccacagagaatgcatctctgagtctctatgccagtccatgtccttgcacgaggtatcaagctcgaggtcaaat

SEQ ID NO: 39745 - DNA, 1071 bp, Muscodor strobelii
  misc_feature: SGI cDNA ID NO. 573840
  misc_feature: Encodes the peptide sequence at SEQ ID NO 39746
atggctcacaatttcgatatcacgcctgagcagcaggccggccaacttcacttcctcaaaagtcaagtcatagagaccaaagcacccttgctgaaaccgagagatgctaatctcagtgggcaaacggcaattgttacgggtggcaatgtcggcgttggtcttgagctaggcaggcagctgctcgccctcggcgtagccaagctcatcctcgccgtccgcaacgaggcgggtgggcaggaagcagctaaaacgctgctagcgtcgcgtaaagacggcccgcagagcgtcgaagtgtggaagcttgatcttttggactacacctcggttactgcctttgttgagcgtgtagggcagctcgagcagcgacctgatattgttgttctcaatgccggtctcctttctgctaagctaggactcaacccgtccactggccacgacattgacatgcaggtcaattttctctcaactgtgcttctactcgtacttctactacccatcgtcaagtcaaagccttcgggagcaacggcagtgaagagccctgtaccgcacatctcagtcgtcacgtctgttatggcacattggaccaaacttgaagagcgcaactctgttccgttactccccgctttcgacagcgaggatccagcgcgattcgacatggaggagcgctatagcgctagcaaactgttcgctttgatgttcctcgctgagctcgcccggcgtattccaagtgatgtcgccattctcaacgctccgacacccggaatgactcgcggctcaggcttcatgcgccagaccgccggcaccgtccttggcttcgtaataaacatctactaccgcatatttggccatacgtgcgatgtcggtgctagtcaggtcatggcagcggctgtcaaggccgggcctgaatcacatggacaatttgtagagaatgggaagcaaaggcctttaccagctattatgtatactgcagatggggacaaagtggctaaacagctttggaaagagactttgcaagagttatcattcgctggtgtagagcagatcatcaatgaccttggtacttctcgataa

SEQ ID NO: 39746 - protein, 356 aa, Muscodor strobelii
  misc_feature: SGI Peptide ID NO. 573840
  misc_feature (41)..(200): Pfam Id: PF00106 Pfam Desc: short chain dehydrogenase
  misc_feature (41)..(133): Pfam Id: PF00106 Pfam Desc: short chain dehydrogenase
  misc_feature (8)..(352): NCBI GI: 238844730 Blast Desc: retinol dehydrogenase 12 [Microsporum canis CBS 113480]
  misc_feature (1)..(352): NCBI GI: 256728146 Blast Desc: NECHADRAFT_54058 [Nectria haematococca mpVI 77-13-4]
  misc_feature (2)..(352): NCBI GI: 46138187 Blast Desc: FG10608.1 [Gibberella zeae PH-1]
  misc_feature (18)..(353): NCBI GI: 238505799 Blast Desc: short-chain dehydrogenase/reductase family protein, [Aspergillus flavus NRRL3357] gi|220690218|gb|EED46568.1| short-chain dehydrogenase/reductase family protein, [Aspergillus
  misc_feature (5)..(347): NCBI GI: 242773397 Blast Desc: short-chain dehydrogenase, [Talaromyces stipitatus ATCC 10500] gi|218721851|gb|EED21269.1| short-chain dehydrogenase, [Talaromyces stipitatus ATCC 10500]
  misc_feature (18)..(348): NCBI GI: 46103007 Blast Desc: FG00073.1 [Gibberella zeae PH-1]
  misc_feature (1)..(352): NCBI GI: 242773363 Blast Desc: short-chain dehydrogenase/reductase family protein, [Talaromyces stipitatus ATCC 10500] gi|218721844|gb|EED21262.1| short-chain dehydrogenase/reductase family protein, [Talaromyces
  misc_feature (5)..(308): NCBI GI: 85110131 Blast Desc: NCU08406 [Neurospora crassa OR74A] gi|164423984|ref|XP_001728105.1| NCU10650 [Neurospora crassa OR74A] gi|28924952|gb|EAA34042.1| conserved [Neurospora crassa
  misc_feature (40)..(352): NCBI GI: 212529584 Blast Desc: short-chain dehydrogenase/reductase family protein, [Penicillium marneffei ATCC 18224] gi|210074347|gb|EEA28434.1| short-chain dehydrogenase/reductase family protein, [Penicillium
  misc_feature (33)..(347): NCBI GI: 256720903 Blast Desc: NECHADRAFT_50515 [Nectria haematococca mpVI 77-13-4]
  misc_feature (42)..(264): SWISSPROT Homolog: EC 1.3.1.33 Protochlorophyllide reductase
MAHNFDITPEQQAGQLHFLKSQVIETKAPLLKPRDANLSGQTAIVTGGNVGVGLELGRQLLALGVAKLILAVRNEAGGQEAAKTLLASRKDGPQSVEVWKLDLLDYTSVTAFVERVGQLEQRPDIVVLNAGLLSAKLGLNPSTGHDIDMQVNFLSTVLLLVLLLPIVKSKPSGATAVKSPVPHISVVTSVMAHWTKLEERNSVPLLPAFDSEDPARFDMEERYSASKLFALMFLAELARRIPSDVAILNAPTPGMTRGSGFMRQTAGTVLGFVINIYYRIFGHTCDVGASQVMAAAVKAGPESHGQFVENGKQRPLPAIMYTADGDKVAKQLWKETLQELSFAGVEQIINDLGTSR

SEQ ID NO: 39747 - DNA, 2836 bp, Muscodor strobelii
  misc_feature: SGI EST ID NO. CUFF.96110.2
  misc_feature: Variant of the nucleotide sequence at SEQ ID NO 39745
gtaggttcatcgaatgtggtccatctgtcggtcgcattagagaaagccggttgaccagggaaagacaatgtcgtatcatcgtcggtccagtcaattgaagataatattgaagtcaaattcgtcttttcagtttgtagccttggtctcaagactgacccgagggcccatcgtggaatcaaaaaccacgagcacaacgcgaaaaacggtttcttggacatcattttcaccggaaagtgaagaaatggcacgacgtgagtcttctatacactacaatggcatcatgaactctcacgacagagcagatcgccgacaccattatatactctccaaagcaacccccttcagctcaggttccctccccgagcgtcgcgtcaaaaccgccgcgttctactatcatgatgattgcctgaaatagacatcactctagtgacaataccgggctaggaaatcgacgccaacggactggggcttccgaaaaggctaatgccttttagaatttggaaggcagaatttgtgtcggcctataattaacacctcatggcacgagctgagacagtcacgatcctggcttgaatgattagtatacgatgttcctgagcgtcattatcgcggtcttcgaggctgatatcctggaggcgcattctttcgcaaggcgctatcgtatctcggtcatgcgagttgctcattggcagcctcatcgcaaactatcgaatcctgtccgattaggcccaacaccaaaaataagcatgaattcacgtcatgtagcacgtggcctgctgaacctggaagagcatccgctatgccggaaccgatagctgtgccgaacctcggtgtggaatgctttgtctgaactgtcatatgagatgccaagcgattggctcgattgtctctaagcgagcaaaaaagcattggatcatgagacggcgtgagattcatgcttggatcccgggatgtgcatgtaggaccgagatgacggaggcattgttaacgaaataggtgcacacctagggggcgtgttcaagacgatgcgatcgtgtgggagagaaagagaagaacttcaggagattaagagaattggaagggggaaaacgccagtacttaggaaatttatagtgggtctcttaggtgacctttaacccctgtgtcaacgtgccaagggggcatggcattggctgacgtgagacacttggttgcgagcaaccacacctatctccggccccgttactatctgccatcaacaatgtggcgtcgtcgattataatgccattgactggaagcctagaacgccatccgcatgtttcgcgagggctgaagatgtgcgtcgcaggtatgataccgtatttttcgctctagctcctcgacaggaactcccccagccaatgagcacgaagatggcgacgccaaagtacaccctgatttatcagcgatacgcgcgcctttgagcggcgacccaagtacaggtattctctcttgtgttggatctcgcaatctgtaatattgttaaaagggcaaagttacgtaacttcgagctgcgcaaagctcgctaagcggtatcacaggctttctcaggtacccaggtataaaattggtcgtacatataacttcggccttacaatggccaacgacattcatgtacaaccagtagctatcagtattttcatatctgtgacttaaaatcggagagagcaacgacatggctcacaatttcgatatcacgcctgagcagcaggccggccaacttcacttcctcaaaagtcaagtcatagagaccaaagcacccttgctgaaaccgagagatgctaatctcagtgggcaaacggcaattgttacgggtggcaatgtcggcgttggtcttgagctaggcaggcagctgctcgccctcggcgtagccaagctcatcctcgccgtccgcaacgaggcgggtgggcaggaagcagctaaaacgctgctagcgtcgcgtaaagacggcccgcagagcgtcgaagtgtggaagcttgatcttttggactacacctcggttactgcctttgttgagcgtgtagggcagctcgagcagcgacctgatattgttgttctcaatgccggtctcctttctgctaagctaggactcaacccgtccactggccacgacattgacatgcaggtcaattttctctcaactgtgcttctactcgtacttctactacccatcgtcaagtcaaagccttcgggagcaacggcagtgaagagccctgtaccgcacatctcagtcgtcacgtctgttatggcacattggaccaaacttgaagagcgcaactctgttccgttactccccgctttcgacagcgaggatccagcgcgattcgacatggaggagcgctatagcgctagcaaactgttcgctttgatgttcctcgctgagctcgcccggcgtattccaagtgatgtcgccattctcaacgctccgacacccggaatgactcgcggctcaggcttcatgcgccagaccgccggcaccgtccttggcttcgtaataaacatctactaccgcatatttggccatacgtgcgatgtcggtgctagtcaggtcatggcagcggctgtcaaggccgggcctgaatcacatggacaatttgtagagaatgggaagcaaaggcctttaccagctattatgtatactgcagatggggacaaagtggctaaacagctttggaaagagactttgcaagagttatcattcgctggtgtagagcagatcatcaatgaccttggtacttctcgataatgtttgtatgcgttggggtgtatcgcgggactgagctgtagttactcacaccgaaaatggattccaaatcgc

SEQ ID NO: 39748 - DNA, 1428 bp, Muscodor strobelii
  misc_feature: SGI cDNA ID NO. 573841
  misc_feature: Encodes the peptide sequence at SEQ ID NO 39749
atggctttactgggattggagatgttctacgcggcgctgacgcttgttgttcttatgatcacatcttacgtggtgtatcagatcaccttctcgccgcttgcacgcgtgccgggtccattccttgcaaaattcagccaattgtatctcgtgtactttcatctttctggtcaagcacatcgtatgttgatgaaattgcacgagaagtatggcaacgttgtgcgcactggaccaacgacattaagtatcgccgatccagatgcgttttacgagatgtatcgtgctggcaacaagttccttaaaacaaacgctagaggcacgacgcgtgacgacgacgttacttgggatctagtcaacgagacaagcgagaaaaagcacggcgatatgaggcgccttgtagcacgtgcatatgccatggacacaatggtcaaccttgagcctatgatcgatgaattaatcggcgaccttctccgcaagttacgcgagctacaaggtcagcgaatcgatattggtcattgggctaatctttatgctttcggtacgttacgaatactctcgctcttcttcctgctcgttgtgtcttcaatactacatgtcattggttctatcaccttttctcgaccattcggtctcgttgaaacaggtgacgatgatggcttatttgcccgtctgcaagacatcttccactcaatagtatgggtggcgtatgctcattgggcttatcactttaatcgcctaatattgacaccccttgttggttcttgtctggcactcactgaccaggatttccacttcgtcgagatcgcttccaaacgcatgaaggagcgagaagcacagggtggtaatacgaaagacttgttaggtcagatgcgtgcaacacagcaagtgaagccacatttccgggactctcatattcttcacatgatatctaccaatgttcttgcaggcagtgatactacagccacagctttacgagccacgctctggttgctacttacgcaccctgaagtcctcgcacgcctacgtagtgaactccaagcgaagagtgcagaagatactaaagaggggaacaaaggagtctggaaatttgccaagtcagagcagtgtccttatctgcaagctgttttgtacgaaagtctacgcctgtttcccccggctgctgtgacgcttgacagggtagttcctgcaggtgggatgaaagctggcccacatcacataccagctggcactgttgtaggaacgagcccctgggttattcagcggctgcctgagctctggggctccgacgctgatgaattccggccagagagatggctggacaaggagtcagaatcacaacgactggccttctttacctcgatgggccgtattgccgactcactgagtccacaaatgcctaagcgcgattcaatgagctatgcgagcgtctga

SEQ ID NO: 39749 - protein, 475 aa, Muscodor strobelii
  misc_feature: SGI Peptide ID NO. 573841
  misc_feature (37)..(472): Pfam Id: PF00067 Pfam Desc: Cytochrome P450
  misc_feature (198)..(441): Pfam Id: PF00067 Pfam Desc: Cytochrome P450
  misc_feature (37)..(178): Pfam Id: PF00067 Pfam Desc: Cytochrome P450
  misc_feature (10)..(454): NCBI GI: 145246500 Blast Desc: An12g04250 [Aspergillus niger] gi|134080216|emb|CAK46195.1| protein product [Aspergillus niger]
  misc_feature (9)..(443): NCBI GI: 169783170 Blast Desc: [Aspergillus oryzae RIB40] gi|83774791|dbj|BAE64914.1| protein product [Aspergillus oryzae]
  misc_feature (11)..(441): NCBI GI: 115492829 Blast Desc: [Aspergillus terreus NIH2624] gi|114197902|gb|EAU39602.1| [Aspergillus terreus NIH2624]
  misc_feature (12)..(454): NCBI GI: 240106426 Blast Desc: Cytochrome P450 family protein [Coccidioides posadasii C735 delta SOWgp]
  misc_feature (12)..(454): NCBI GI: 119191552 Blast Desc: CIMG_00153 [Coccidioides immitis RS]
  misc_feature (15)..(451): NCBI GI: 212537387 Blast Desc: benzoate 4-monooxygenase cytochrome P450, [Penicillium marneffei ATCC 18224] gi|210068591|gb|EEA22682.1| benzoate 4-monooxygenase cytochrome P450, [Penicillium marneffei ATCC
  misc_feature (13)..(454): NCBI GI: 169618263 Blast Desc: SNOG_12323 [Phaeosphaeria nodorum SN15] gi|160703583|gb|EAT80136.2| SNOG_12323 [Phaeosphaeria nodorum SN15]
  misc_feature (13)..(438): NCBI GI: 171693077 Blast Desc: protein product [Podospora anserina] gi|170946487|emb|CAP73288.1| protein product [Podospora anserina]
  misc_feature (14)..(413): NCBI GI: 145240523 Blast Desc: An08g07910 [Aspergillus niger] gi|134077430|emb|CAK45684.1| protein product [Aspergillus niger]
  misc_feature (33)..(439): NCBI GI: 261360632 Blast Desc: pisatin demethylase [Verticillium albo-atrum VaMs.102]
  misc_feature (33)..(437): SWISSPROT Homolog: EC 1.14.13.12 Benzoate 4-monooxygenase
MALLGLEMFYAALTLVVLMITSYVVYQITFSPLARVPGPFLAKFSQLYLVYFHLSGQAHRMLMKLHEKYGNVVRTGPTTLSIADPDAFYEMYRAGNKFLKTNARGTTRDDDVTWDLVNETSEKKHGDMRRLVARAYAMDTMVNLEPMIDELIGDLLRKLRELQGQRIDIGHWANLYAFGTLRILSLFFLLVVSSILHVIGSITFSRPFGLVETGDDDGLFARLQDIFHSIVWVAYAHWAYHFNRLILTPLVGSCLALTDQDFHFVEIASKRMKEREAQGGNTKDLLGQMRATQQVKPHFRDSHILHMISTNVLAGSDTTATALRATLWLLLTHPEVLARLRSELQAKSAEDTKEGNKGVWKFAKSEQCPYLQAVLYESLRLFPPAAVTLDRVVPAGGMKAGPHHIPAGTVVGTSPWVIQRLPELWGSDADEFRPERWLDKESESQRLAFFTSMGRIADSLSPQMPKRDSMSYASV

SEQ ID NO: 39750 - DNA, 1638 bp, Muscodor strobelii
  misc_feature: SGI cDNA ID NO. 573842
  misc_feature: Encodes the peptide sequence at SEQ ID NO 39751
atgttcgagctactagaaatcagcggatatgggatcgagagaatgagaacacattggctcgctgctcttggtactctctatttggggtatcatgttgcattgattatctacaacctattcttccatcccttgtcaaaggttccaggtcctttcctagggcgtagtactatggtaagcctcggcgagaaattctcctattgcgtctcgtttttcttcgcttttttggttagaatagatttgaacattcaatgttccttagctatggcggttctgggatacgacgagcgggcagcatcaccggcatatgctgagaatgcattcaaaatacgtcaaagactaaacccacatgcaggtaacgttgtgcgagtgtcacctaacgaacttagtttctcaaccgtgcagtcttatcgtgatatctatggcgttccttctccgggaagtcagcattgtatcaagaatgagatgtacgacataattggaagcggcttcaagacggctgatatagcctcggagcgggaccctcaagtccatgcccagaagaagaagcatctaacgcctgctttctcggctcgcgctcttgccgcccaggaggctatcatccatcggtgtctggatgcctttgtagccaagattggtccggtgagtcaacgaaagcccgagctggggatcgacatggtatcatggttcgagatgagtgcattcgatcttttcggagagatgtcgttcggagagagtttcgattgtatcgcagaagagaagcaccacttttggatcgacatggtgctacaccacgtccgcgagatcgtaatcatggataacttgcgtcgcttagcggttctgagactgttctcacaaaagctattgcctaagctagcaatgtccgttttggcaaagcatacgcagtatacgcgggataaggtgcatcgacgcatacaacgcgaatctccgcgccaagacttctttaccaacatggtagccaaggtcaaggctggcgatgttgatatagaagagatgagtgcaaatgcttcgacgctaataattgcagggggcgagactacagcgacaacaagcgcagcaacgctttactttctgttgacaaacccacagtcactcacgaaagtaaccgctgaggtacgcgaacggtgggcatcctacgccaacattgactcgagctcagcacaacaactaccatacttgcaagcatgtatcaatgaggccatgcgcctatatccctcaggcgcgcaaggatttccacgattgtcgcctgggcgcatgattgatggtatctgggtaccgcggggcaccgaagtctatacctgtacctgggttgcttcgcggaatccggactactggaagcggcctcacgatttcattcccgagcgttggatcgattccacctcgacagatgtcagagccgcgagtcagcccttctctttaggatatcgagcttgccctgggcagagtttcgctatgttacagctgagtcttgtcttcgccaagatactctttacctatgatctcaagatgctggagcctaatctggactgggaagctcgttcgcggcattggatcatgtggtggaagccgccaatacgtgttctagcacacaatcgactcgataatcatgtaatgctataa

SEQ ID NO: 39751 - protein, 545 aa, Muscodor strobelii
  misc_feature: SGI Peptide ID NO. 573842
  misc_feature (100)..(535): Pfam Id: PF00067 Pfam Desc: Cytochrome P450
  misc_feature (334)..(535): Pfam Id: PF00067 Pfam Desc: Cytochrome P450
  misc_feature (28)..(537): NCBI GI: 255931847 Blast Desc: Pc12g06380 [Penicillium chrysogenum Wisconsin 54-1255] gi|211582099|emb|CAP80265.1| Pc12g06380 [Penicillium chrysogenum Wisconsin 54-1255]
  misc_feature (36)..(533): NCBI GI: 121712479 Blast Desc: benzoate 4-monooxygenase cytochrome P450 [Aspergillus clavatus NRRL 1] gi|119402003|gb|EAW12425.1| benzoate 4-monooxygenase cytochrome P450 [Aspergillus clavatus NRRL 1]
  misc_feature (28)..(533): NCBI GI: 259485752 Blast Desc: TPA: cytochrome P450, (Eurofung) [Aspergillus nidulans FGSC A4]
  misc_feature (30)..(538): NCBI GI: 238492291 Blast Desc: cytochrome P450, [Aspergillus flavus NRRL3357] gi|220695876|gb|EED52218.1| cytochrome P450, [Aspergillus flavus NRRL3357]
  misc_feature (118)..(533): NCBI GI: 67525647 Blast Desc: AN3281.2 [Aspergillus nidulans FGSC A4] gi|40744069|gb|EAA63249.1| AN3281.2 [Aspergillus nidulans FGSC A4]
  misc_feature (30)..(538): NCBI GI: 169782646 Blast Desc: [Aspergillus oryzae RIB40] gi|83774529|dbj|BAE64652.1| protein product [Aspergillus oryzae]
  misc_feature (32)..(536): NCBI GI: 188596513 Blast Desc: BCL4p [Botryotinia fuckeliana]
  misc_feature (113)..(531): NCBI GI: 259485758 Blast Desc: TPA: cytochrome P450, (Eurofung) [Aspergillus nidulans FGSC A4]
  misc_feature (113)..(531): NCBI GI: 121712467 Blast Desc: benzoate 4-monooxygenase cytochrome P450 [Aspergillus clavatus NRRL 1] gi|119401997|gb|EAW12419.1| benzoate 4-monooxygenase cytochrome P450 [Aspergillus clavatus NRRL 1]
  misc_feature (107)..(533): NCBI GI: 255931851 Blast Desc: Pc12g06400 [Penicillium chrysogenum Wisconsin 54-1255] gi|211582101|emb|CAP80267.1| Pc12g06400 [Penicillium chrysogenum Wisconsin 54-1255]
  misc_feature (118)..(509): SWISSPROT Homolog: EC 1.14.13.12 Benzoate 4-monooxygenase
MFELLEISGYGIERMRTHWLAALGTLYLGYHVALIIYNLFFHPLSKVPGPFLGRSTMVSLGEKFSYCVSFFFAFLVRIDLNIQCSLAMAVLGYDERAASPAYAENAFKIRQRLNPHAGNVVRVSPNELSFSTVQSYRDIYGVPSPGSQHCIKNEMYDIIGSGFKTADIASERDPQVHAQKKKHLTPAFSARALAAQEAIIHRCLDAFVAKIGPVSQRKPELGIDMVSWFEMSAFDLFGEMSFGESFDCIAEEKHHFWIDMVLHHVREIVIMDNLRRLAVLRLFSQKLLPKLAMSVLAKHTQYTRDKVHRRIQRESPRQDFFTNMVAKVKAGDVDIEEMSANASTLIIAGGETTATTSAATLYFLLTNPQSLTKVTAEVRERWASYANIDSSSAQQLPYLQACINEAMRLYPSGAQGFPRLSPGRMIDGIWVPRGTEVYTCTWVASRNPDYWKRPHDFIPERWIDSTSTDVRAASQPFSLGYRACPGQSFAMLQLSLVFAKILFTYDLKMLEPNLDWEARSRHWIMWWKPPIRVLAHNRLDNHVML

SEQ ID NO: 39752 - DNA, 933 bp, Muscodor strobelii
  misc_feature: SGI cDNA ID NO. 573843
  misc_feature: Encodes the peptide sequence at SEQ ID NO 39753
atgacgtcattacaaatcgacgaggggtcaatccccagtctcaatggaaagatcgcagtcgttacaggcggatcatctggtattggccttgcagcggtcaagttattactacgcaagggtgtgatcgttcatgatatcgaccgaaatgagccgattgaggctggctggcattcttggccagatctgcactatcacaagtgtgatgtggcatcgtttgcgtcacagcgagacgtcttcgatttcatcgggcccatagacatggtctttgccaatgctggtgtcgcagagacgtctaatttttttgccgacgctttcgaggctgatggaacaacattggcggagccagactcactgctctttgatgtaaatatcaggggcgtgtggtacacagtcaaacttgcgtggagctcgatgcgcaagtataagatcaacggtagtattgtgattactgctagcacgacaggtatcgcgcctgaagccgcactgccgacttactccgctctcaagcacgcactcaatggcttagtgcgctcactccggaacaatgtcgtgctcgacggcatcacgatcaacgccgttgcgcccgccgggactcacacgccattagttgcggggcaattagacctacttgatgccactgggcttccgataacgtcaccgccagaattaccggcccttgctcttgtctactctgcaaccgcgaagcaggatcgacgtgtagagacatacggcaaagaggagaagcaagatctctataagaaagagaggtggaatgggcgtattatctacgttcttggcgacaagtttaccgagattgagggaccaacagccgacttacgcccatattggtttgggcaggagaaccatcggctggttaacctacaacaagcaacgactgacatgcgaaaaggcatcagtacatcaagatcatag

SEQ ID NO: 39753 - protein, 310 aa, Muscodor strobelii
  misc_feature: SGI Peptide ID NO. 573843
  misc_feature (17)..(184): Pfam Id: PF00106 Pfam Desc: short chain dehydrogenase
  misc_feature (17)..(96): Pfam Id: PF00106 Pfam Desc: short chain dehydrogenase
  misc_feature (1)..(302): NCBI GI: 255931837 Blast Desc: Pc12g06330 [Penicillium chrysogenum Wisconsin 54-1255] gi|211582094|emb|CAP80260.1| Pc12g06330 [Penicillium chrysogenum Wisconsin 54-1255]
  misc_feature (1)..(304): NCBI GI: 121712475 Blast Desc: short chain dehydrogenase/reductase family oxidoreductase, [Aspergillus clavatus NRRL 1] gi|119402001|gb|EAW12423.1| short chain dehydrogenase/reductase
  misc_feature (23)..(304): NCBI GI: 67525643 Blast Desc: AN3279.2 [Aspergillus nidulans FGSC A4] gi|40744067|gb|EAA63247.1| AN3279.2 [Aspergillus nidulans FGSC A4] gi|259485754|tpe|CBF83042.1| TPA: conserved [Aspergillus FGSC
  misc_feature (1)..(302): NCBI GI: 238492297 Blast Desc: short-chain dehydrogenase, [Aspergillus flavus NRRL3357] gi|220695879|gb|EED52221.1| short-chain dehydrogenase, [Aspergillus flavus NRRL3357]
  misc_feature (1)..(302): NCBI GI: 238839257 Blast Desc: conserved [Microsporum canis CBS 113480]
  misc_feature (1)..(302): NCBI GI: 171677081 Blast Desc: protein product [Podospora anserina] gi|170936608|emb|CAP61267.1| protein product [Podospora anserina]
  misc_feature (1)..(287): NCBI GI: 226280832 Blast Desc: conserved [Paracoccidioides brasiliensis Pb01]
  misc_feature (1)..(293): NCBI GI: 261196928 Blast Desc: conserved [Ajellomyces dermatitidis SLH14081] gi|239596112|gb|EEQ78693.1| conserved [Ajellomyces dermatitidis SLH14081]
  misc_feature (17)..(287): NCBI GI: 189196838 Blast Desc: conserved [Pyrenophora tritici-repentis Pt-1C-BFP] gi|187980636|gb|EDU47262.1| conserved [Pyrenophora tritici-repentis Pt-1C-BFP]
  misc_feature (13)..(296): NCBI GI: 212540818 Blast Desc: 15-hydroxyprostaglandin dehydrogenase, [Penicillium marneffei ATCC 18224] gi|210067863|gb|EEA21955.1| 15-hydroxyprostaglandin dehydrogenase, [Penicillium marneffei
  misc_feature (14)..(239): SWISSPROT Homolog: EC 1.1.1.30 3-hydroxybutyrate dehydrogenase
MTSLQIDEGSIPSLNGKIAVVTGGSSGIGLAAVKLLLRKGVIVHDIDRNEPIEAGWHSWPDLHYHKCDVASFASQRDVFDFIGPIDMVFANAGVAETSNFFADAFEADGTTLAEPDSLLFDVNIRGVWYTVKLAWSSMRKYKINGSIVITASTTGIAPEAALPTYSALKHALNGLVRSLRNNVVLDGITINAVAPAGTHTPLVAGQLDLLDATGLPITSPPELPALALVYSATAKQDRRVETYGKEEKQDLYKKERWNGRIIYVLGDKFTEIEGPTADLRPYWFGQENHRLVNLQQATTDMRKGISTSRS

SEQ ID NO: 39754 - DNA, 187 bp, Muscodor strobelii
  misc_feature: SGI EST ID NO. CUFF.96025.0
  misc_feature: Variant of the nucleotide sequence at SEQ ID NO 39752
ggtcacgcagccctcatcgcggcgctttcgcaaatgagccgcacttctatcggacctgtctcgttaggattcaccatttaccactcatattacacagatctttaagaatgacgtcattacaaatcgacgaggggtcaatccccagtctcaatggaaagatcgcagtcgttacaggcggatcatctgg

SEQ ID NO: 39755 - DNA, 1503 bp, Muscodor strobelii
  misc_feature: SGI cDNA ID NO. 573844
  misc_feature: Encodes the peptide sequence at SEQ ID NO 39756
atgctacatttgaagaaggcagcagctggcaaagcttgccaggctttactactggccctaccgggacaggtctttctggcagatagccacgactggcacattgcttcgaaagaggtctggtcaaaaacatgcgttctttctccagaatgcgtctttgagcccaagaccgcgctagatctgagcgaaggtatgaaactgattaaagagcatggatcattgttttccgtaaagagtgggggccatatggccgtcccgggtgctcagtccgtggagggcggcattatgatatctatgtcaaatttcaacgagaggactctcaacgaggacagatcagttgcttctataggtccgggacagctctggcttggggtgtatagctggcttgtggactatggactcgcagttaacggtggtcggtaccctatggttggggtaggcggcgtcttgctcggaggcggtatgggctactttgccggtcagcgcggatggtcaatcgacgacatcgtaggatgggaagttgttcttgccaatgggtcgatagtccgcgtgactaccttacccgaagatccttattctgacttggcatgggccttgcgaggcggccacaactactttggcgttgtgacccggtttgagatgcgcacctttcctgccggaccagcatatggagggctagttgtatatgatgctgccgccgaaacagtattttttgatgctctggacgcttacatggctccaggcggtggctctgatgaccctctttctgcgatcaatcctgcatcgacaatgcgacttgtcaatggcgagtgggtacccgggcttttgaacgtctacatgtacgccgatgccaattcaaacccacatgcgttgcaaaatttcaccagcataccggccgaacatgttgtctttggtgagtcgaagctgcatgatagctgggtcagcatacctcaatcacttgcagccctggcaacgcgagaggaccgaacactgttttgggcgatcacgtttaaagccgataggcgagctattgagatcgtgacacagacgttctatgctggtacccgagagttgaaacatgtggaggggctatcgatgacaatttcttttcagcctctggctaccccgtatcttactgcgtctacaaaagaagggggcaatctgatggggttgcatgcgacagaagacagcggatacttcgccggtatcctctttccggtgtggaagttcgaacgagacgacgaagcggtctacgactttacaaaaagggccgcaaagatcatggaagatcagttaaccgagttggatctttttcacccatttatttacctcaatgatgcagcgaagggacaagcccctttcgagagctatgcacgaggtgaaaatgtggctaagcttcagaaaattcaactgaagtacgaccctgatggatttctcaaggagcatctacaacacggctttgaactgggatccccaagtcaatccaggcaacacggagaattgtga

SEQ ID NO: 39756 - protein, 500 aa, Muscodor strobelii
  misc_feature: SGI Peptide ID NO. 573844
  misc_feature (48)..(184): Pfam Id: PF01565 Pfam Desc: FAD binding domain
  misc_feature (8)..(490): NCBI GI: 259485759 Blast Desc: TPA: FAD-binding oxidoreductase, (AFU_orthologue; AFUA_3G03300) [Aspergillus nidulans FGSC A4]
  misc_feature (7)..(489): NCBI GI: 121712465 Blast Desc: FAD binding domain protein [Aspergillus clavatus NRRL 1] gi|119401996|gb|EAW12418.1| FAD binding domain protein [Aspergillus clavatus NRRL 1]
  misc_feature (8)..(473): NCBI GI: 67525633 Blast Desc: AN3274.2 [Aspergillus nidulans FGSC A4] gi|40744062|gb|EAA63242.1| AN3274.2 [Aspergillus nidulans FGSC A4]
  misc_feature (13)..(488): NCBI GI: 67523863 Blast Desc: AN2387.2 [Aspergillus nidulans FGSC A4] gi|40745342|gb|EAA64498.1| AN2387.2 [Aspergillus nidulans FGSC A4] gi|259487790|tpe|CBF86739.1| TPA: conserved [Aspergillus FGSC
  misc_feature (11)..(492): NCBI GI: 255931835 Blast Desc: Pc12g06320 [Penicillium chrysogenum Wisconsin 54-1255] gi|211582093|emb|CAP80259.1| Pc12g06320 [Penicillium chrysogenum Wisconsin 54-1255]
  misc_feature (13)..(489): NCBI GI: 154296896 Blast Desc: BC1G_12537 [Botryotinia fuckeliana B05.10] gi|150843191|gb|EDN18384.1| BC1G_12537 [Botryotinia fuckeliana B05.10]
  misc_feature (13)..(488): NCBI GI: 145231464 Blast Desc: An02g00740 [Aspergillus niger] gi|134056114|emb|CAK96289.1| protein product [Aspergillus niger]
  misc_feature (2)..(488): NCBI GI: 169772357 Blast Desc: [Aspergillus oryzae RIB40] gi|83768508|dbj|BAE58645.1| protein product [Aspergillus oryzae]
  misc_feature (2)..(488): NCBI GI: 238490256 Blast Desc: 6-hydroxy-D-nicotine oxidase, [Aspergillus flavus NRRL3357] gi|220696778|gb|EED53119.1| 6-hydroxy-D-nicotine oxidase, [Aspergillus flavus NRRL3357]
  misc_feature (9)..(487): NCBI GI: 121716174 Blast Desc: FAD binding domain protein [Aspergillus clavatus NRRL 1] gi|119403853|gb|EAW14270.1| FAD binding domain protein [Aspergillus clavatus NRRL 1]
MLHLKKAAAGKACQALLLALPGQVFLADSHDWHIASKEVWSKTCVLSPECVFEPKTALDLSEGMKLIKEHGSLFSVKSGGHMAVPGAQSVEGGIMISMSNFNERTLNEDRSVASIGPGQLWLGVYSWLVDYGLAVNGGRYPMVGVGGVLLGGGMGYFAGQRGWSIDDIVGWEVVLANGSIVRVTTLPEDPYSDLAWALRGGHNYFGVVTRFEMRTFPAGPAYGGLVVYDAAAETVFFDALDAYMAPGGGSDDPLSAINPASTMRLVNGEWVPGLLNVYMYADANSNPHALQNFTSIPAEHVVFGESKLHDSWVSIPQSLAALATREDRTLFWAITFKADRRAIEIVTQTFYAGTRELKHVEGLSMTISFQPLATPYLTASTKEGGNLMGLHATEDSGYFAGILFPVWKFERDDEAVYDFTKRAAKIMEDQLTELDLFHPFIYLNDAAKGQAPFESYARGENVAKLQKIQLKYDPDGFLKEHLQHGFELGSPSQSRQHGEL

SEQ ID NO: 39757 - DNA, 1683 bp, Muscodor strobelii
  misc_feature: SGI cDNA ID NO. 573845
  misc_feature: Encodes the peptide sequence at SEQ ID NO 39758
atgaacatagactcagaaactttcgagtcggatctcatggtcaactctcagagcaatgagaaacacaccgaccccatctcgtctggtagctctggagactcgggaactgtccagaagcctgagatcctgtacccttcggtctggcgtcaaggaattattgtcacaggtctactgctcggcatttttctcgccggtctcgacatcaacattatcgccacagccattcctgctatcacaagtcacttcaactctctgtcggaatcggggtggtatggctctgccttcttccttgcctactcggctttccagtccctttggggcaaggcatacaagtattttgacatgaaatatacctttctagcctccatggtcgtgttcgagatcggatgcctagttggtggtatcgcgccgagtagcggagcattgattgttggccgcgttatccaaggcggaggggctgctggcattctctccggttgctaccagattgccaacttcgttgttcctgccaacagagtacctctcgtcatcggtatgattggcaccgtcttcagcatcgcaagtgtgattggtcccctcctcggtggcatcttcacctcctcgcataacctcacctggcgctggtgcttctatatcaatcttcccgtcggtggtgttcctatctttatcattttaatcttcttcaagaccccgcctcaagcaaagttgccgcagaaagactcggttaaggaaatcgctcttagctttgatcctctcggcgtactcttatttggcgctgcccttgtcagctacatcctggctctcacttggggtgggacggtgaaggcttggagctcatctactataatcggactgctcatagcatggattcttctaagtatcattttcgtcgtgaacgaattctggcaaggagaaagagccttgattgttgtgcgtctatttaaaaagagggatatgtgggtaaacggaatcgttctcttcttttattttggggcgtattttgccattgtctatagccttccgacctatttccaggcggctttggaactgacacctggagaaagtggaattcgaaccattgctatcattggttcgacttctgtcgcaagcttatttggctcagtactcttcgggaaatatggtcgatatacactgttccaaattgctggcataggtgcggcagccatatccggtggccttatatacactctcgatattgataccagcctcggtaaacaattgggttatcaaatcctacttggtgctggcattggctggattgttcaaattccgccaatcatcgcaggtgtcgtcaacaagacagcagacaaagcagtgggcactgccgctgttcttgtcatccaattctactctgcctctcttggaatcagtgctgcgtctgctattatcaacaacatactgatagaaagagtgccctattattcgccagagactaccccagccgaggttctctccatcgggccgtacgatctcaagtcccactttagcggcgatacgctacttgccgtcaaaagggcctacatagatgcacttcgcgcgtcatggatattgagtattgccttgtggggtgtggctttcttttgtactttcttggccaagtggccgggccatgttgtacctgctcaggaggatgcggaatcagataccgaggtcgaaaaatag

SEQ ID NO: 39758 - protein, 560 aa, Muscodor strobelii
  misc_feature: SGI Peptide ID NO. 573845
  misc_feature (57)..(465): Pfam Id: PF07690 Pfam Desc: Major Facilitator Superfamily
  misc_feature (57)..(296): Pfam Id: PF07690 Pfam Desc: Major Facilitator Superfamily
  misc_feature (310)..(465): Pfam Id: PF07690 Pfam Desc: Major Facilitator Superfamily
  misc_feature (20)..(540): NCBI GI: 238841277 Blast Desc: MFS gliotoxin efflux transporter GliA [Microsporum canis CBS 113480]
  misc_feature (44)..(540): NCBI GI: 240106665 Blast Desc: Major Facilitator Superfamily protein [Coccidioides posadasii C735 delta SOWgp]
  misc_feature (15)..(540): NCBI GI: 119174022 Blast Desc: CIMG_08993 [Coccidioides immitis RS]
  misc_feature (18)..(541): NCBI GI: 261359861 Blast Desc: GliA [Verticillium albo-atrum VaMs.102]
  misc_feature (61)..(554): NCBI GI: 121711439 Blast Desc: MFS transporter, [Aspergillus clavatus NRRL 1] gi|119401486|gb|EAW11909.1| MFS transporter, [Aspergillus clavatus NRRL 1]
  misc_feature (11)..(542): NCBI GI: 156065817 Blast Desc: SS1G_00919 [Sclerotinia sclerotiorum 1980] gi|154691778|gb|EDN91516.1| SS1G_00919 [Sclerotinia sclerotiorum 1980]
  misc_feature (19)..(541): NCBI GI: 242806680 Blast Desc: MFS multidrug transporter, [Talaromyces stipitatus ATCC 10500] gi|218715419|gb|EED14841.1| MFS multidrug transporter, [Talaromyces stipitatus ATCC 10500]
  misc_feature (4)..(542): NCBI GI: 154301769 Blast Desc: BC1G_10036 [Botryotinia fuckeliana B05.10] gi|150855698|gb|EDN30890.1| BC1G_10036 [Botryotinia fuckeliana B05.10]
  misc_feature (14)..(547): NCBI GI: 212538451 Blast Desc: MFS multidrug transporter, [Penicillium marneffei ATCC 18224] gi|210069123|gb|EEA23214.1| MFS multidrug transporter, [Penicillium marneffei ATCC 18224]
  misc_feature (20)..(541): NCBI GI: 146322684 Blast Desc: MFS multidrug transporter [Aspergillus fumigatus Af293] gi|129557790|gb|EAL91021.2| MFS multidrug transporter, [Aspergillus fumigatus Af293] gi|159131795|gb|EDP56908.1| MFS
MNIDSETFESDLMVNSQSNEKHTDPISSGSSGDSGTVQKPEILYPSVWRQGIIVTGLLLGIFLAGLDINIIATAIPAITSHFNSLSESGWYGSAFFLAYSAFQSLWGKAYKYFDMKYTFLASMVVFEIGCLVGGIAPSSGALIVGRVIQGGGAAGILSGCYQIANFVVPANRVPLVIGMIGTVFSIASVIGPLLGGIFTSSHNLTWRWCFYINLPVGGVPIFIILIFFKTPPQAKLPQKDSVKEIALSFDPLGVLLFGAALVSYILALTWGGTVKAWSSSTIIGLLIAWILLSIIFVVNEFWQGERALIVVRLFKKRDMWVNGIVLFFYFGAYFAIVYSLPTYFQAALELTPGESGIRTIAIIGSTSVASLFGSVLFGKYGRYTLFQIAGIGAAAISGGLIYTLDIDTSLGKQLGYQILLGAGIGWIVQIPPIIAGVVNKTADKAVGTAAVLVIQFYSASLGISAASAIINNILIERVPYYSPETTPAEVLSIGPYDLKSHFSGDTLLAVKRAYIDALRASWILSIALWGVAFFCTFLAKWPGHVVPAQEDAESDTEVEK

SEQ ID NO: 39759 - DNA, 953 bp, Muscodor strobelii
  misc_feature: SGI EST ID NO. CUFF.96038.0
  misc_feature: Variant of the nucleotide sequence at SEQ ID NO 39757
ccgcgttatccaaggcggaggggctgctggcattctctccggttgctaccagattgccaacttcgttgttcctgccaacagagtacctctcgtcatcggtatgattggcaccgtcttcagcatcgcaagtgtgattggtcccctcctcggtggcatcttcacctcctcgcataacctcacctggcgctggtgcttctatatcaatcttcccgtcggtggtgttcctatctttatcattttaatcttcttcaagaccccgcctcaagcaaagttgccgcagaaagactcggttaaggaaatcgctcttagctttgatcctctcggcgtactcttatttggcgctgcccttgtcagctacatcctggctctcacttggggtgggacggtgaaggcttggagctcatctactataatcggactgctcatagcatggattcttctaagtatcattttcgtcgtgaacgaattctggcaaggagaaagagccttgattgttgtgcgtctatttaaaaagagggatatgtgggtaaacggaatcgttctcttcttttattttggggcgtattttgccattgtctatagccttccgacctatttccaggcggctttggaactgacacctggagaaagtggaattcgaaccattgctatcattggttcgacttctgtcgcaagcttatttggctcagtactcttcgggaaatatggtcgatatacactgttccaaattgctggcataggtgcggcagccatatccggtggccttatatacactctcgatattgataccagcctcggtaaacaattgggttatcaaatcctacttggtgctggcattggctggattgttcaaattccgccaatcatcgcaggtgtcgtcaacaagacagcagacaaagcagtgggcactgccgctgttcttgtcatccaattctactctgcctctcttggaa

SEQ ID NO: 39760 - DNA, 483 bp, Muscodor strobelii
  misc_feature: SGI cDNA ID NO. 573846
  misc_feature: Encodes the peptide sequence at SEQ ID NO 39761
atgcccgtgcgagctagagactcagcgcatctgaaacaatggggagacatgaacggttgcccaaacgctgagctccatatgaacagcaaaatgctctgctccttgacagatgctgtcaaagctatcctccctaactttgaaatcgctgtcaggtcaattgtagcatcattacgaaactcttccgaccccagcgaatgcatagtccctaattctggagctgtagaggatataccgctggccttgattggcgatctcgagttagagcctgtagaacggaccatcgttatacaagaggcgttgaagcacttgaccctacgtctgctagcgctcgtgcaggacatcgaggaagagactgcgctggtcacacgaagcgtcgagcttgagtctccactacctgataccagtttcgaagaacttgctactaggttatttaaattgttaggaaacgttaaccagatcgtttctattgaccacggtgattaa

SEQ ID NO: 39761 - protein, 160 aa, Muscodor strobelii
  misc_feature: SGI Peptide ID NO. 573846
MPVRARDSAHLKQWGDMNGCPNAELHMNSKMLCSLTDAVKAILPNFEIAVRSIVASLRNSSDPSECIVPNSGAVEDIPLALIGDLELEPVERTIVIQEALKHLTLRLLALVQDIEEETALVTRSVELESPLPDTSFEELATRLFKLLGNVNQIVSIDHGD

SEQ ID NO: 39762 - DNA, 1119 bp, Muscodor strobelii
  misc_feature: SGI cDNA ID NO. 573847
  misc_feature: Encodes the peptide sequence at SEQ ID NO 39763
atgcatctcagactttcgatcatatacgtcctggccgtggtgacaggtgctctagctattgagccgcagcagttggatactcgccagcagccattcaagtcaacagtcatcaccagccataccgagccatgggcgtttgccttcttgccagataatcgcatcctcctcacggagagacgaggcaacttacgtctcgtcaacccagacaccaaaaccataggcaccatcacaggtgtgcctacagttgcctacggcggtcagggtggccttgctgatgttgccttgcatcctcaatacgccaataatagtattatatatatcagctatgccgcgagtggcactggcggcgcaggtggagtagtcgcgcgggccaaactgacactggacgccaacggcggcggtgcgctatccggtctggaggtcatttggcgtcactcttcgaacgcccaaggtggacttcaatatgcccttcgcctgctgtttggccccgacggtgcgctatggatatcatccggcgagatcaaccagatgaccccgtctcaatccatgaccagcaacctgggcaagatgatcaagttgtacgacaacggcacctccttcgcaggaaacccgttcgccagccaaggtactatccaggcgcagatctggtcactggggcaccgtaacccgctaggcattgactgggacgctcagggacggctctgggaggtcgaaatggggcccatgggtggcgacgagctcaaccttatccaatcaggcgccaactacggctggccgctcgtgtgcgagggcaatcattacaacggcacgcaaatcccccgtcacagcacacgccccgatttcgcagcgcccaaggccttctgggtccccgttatctctccggccggattgatcatctacaaaggtgacttgttctcggcctggaagggcaatgctatcatcacaggtctcacttcaatggcaatcgtccgcgcaaccatcacgggtgacacggcgaaggaggctcagcgtatctcaatgggtaagcgaatgcgcggtatccgagaacattcagacggctctatttgggtgatcgaggacggtgctggcggccggctcttgaagcttacccctagctaa

SEQ ID NO: 39763 - protein, 372 aa, Muscodor strobelii
  misc_feature: SGI Peptide ID NO. 573847
  misc_feature (234)..(339): Pfam Id: PF07995 Pfam Desc: Glucose / Sorbosone dehydrogenase
  misc_feature (1)..(372): NCBI GI: 116199987 Blast Desc: CHGG_08149 [Chaetomium globosum CBS 148.51] gi|88179428|gb|EAQ86896.1| CHGG_08149 [Chaetomium globosum CBS 148.51]
  misc_feature (1)..(371): NCBI GI: 171682830 Blast Desc: protein product [Podospora anserina] gi|170941374|emb|CAP67024.1| protein product [Podospora anserina]
  misc_feature (29)..(372): NCBI GI: 58583738 Blast Desc: dehydrogenase [Xanthomonas oryzae pv. oryzae KACC10331] gi|58428332|gb|AAW77369.1| dehydrogenase [Xanthomonas oryzae pv. oryzae KACC10331]
  misc_feature (29)..(372): NCBI GI: 166710411 Blast Desc: dehydrogenase [Xanthomonas oryzae pv. oryzicola BLS256]
  misc_feature (29)..(372): NCBI GI: 190572519 Blast Desc: dehydrogenase [Stenotrophomonas maltophilia K279a] gi|190010441|emb|CAQ44049.1| dehydrogenase [Stenotrophomonas maltophilia K279a]
  misc_feature (8)..(372): NCBI GI: 188993393 Blast Desc: secreted protein [Xanthomonas campestris pv. campestris str. B100] gi|167735153|emb|CAP53365.1| secreted protein [Xanthomonas campestris pv. campestris]
  misc_feature (8)..(372): NCBI GI: 21233241 Blast Desc: dehydrogenase [Xanthomonas campestris pv. campestris str. ATCC 33913] gi|66770183|ref|YP_244945.1| dehydrogenase [Xanthomonas campestris pv. campestris str. 8004] dehydrogenase
  misc_feature (29)..(372): NCBI GI: 188574991 Blast Desc: dehydrogenase [Xanthomonas oryzae pv. oryzae PXO99A] gi|188519443|gb|ACD57388.1| dehydrogenase [Xanthomonas oryzae pv. oryzae PXO99A]
  misc_feature (29)..(372): NCBI GI: 254524148 Blast Desc: quinoprotein glucose dehydrogenase, [Stenotrophomonas sp. SKA14] gi|219721739|gb|EED40264.1| quinoprotein glucose dehydrogenase, [Stenotrophomonas sp. SKA14]
  misc_feature (29)..(372): NCBI GI: 21244592 Blast Desc: dehydrogenase [Xanthomonas axonopodis pv. citri str. 306] gi|21110271|gb|AAM38710.1| dehydrogenase [Xanthomonas axonopodis pv. citri str. 306]
  misc_feature (4)..(262): SWISSPROT Homolog: EC 1.1.5.2 Quinoprotein glucose dehydrogenase
MHLRLSIIYVLAVVTGALAIEPQQLDTRQQPFKSTVITSHTEPWAFAFLPDNRILLTERRGNLRLVNPDTKTIGTITGVPTVAYGGQGGLADVALHPQYANNSIIYISYAASGTGGAGGVVARAKLTLDANGGGALSGLEVIWRHSSNAQGGLQYALRLLFGPDGALWISSGEINQMTPSQSMTSNLGKMIKLYDNGTSFAGNPFASQGTIQAQIWSLGHRNPLGIDWDAQGRLWEVEMGPMGGDELNLIQSGANYGWPLVCEGNHYNGTQIPRHSTRPDFAAPKAFWVPVISPAGLIIYKGDLFSAWKGNAIITGLTSMAIVRATITGDTAKEAQRISMGKRMRGIREHSDGSIWVIEDGAGGRLLKLTPS

SEQ ID NO: 39764 - DNA, 992 bp, Muscodor strobelii
  misc_feature: SGI EST ID NO. CUFF.96088.0
  misc_feature: Variant of the nucleotide sequence at SEQ ID NO 39762
cggcgcaggtggagtagtcgcgcgggccaaactgacactggacgccaacggcggcggtgcgctatccggtctggaggtcatttggcgtcactcttcgaacgcccaaggtggacttcaatatgcccttcgcctgctgtttggccccgacggtgcgctatggatatcatccggcgagatcaaccagatgaccccgtctcaatccatgaccagcaacctgggcaagatgatcaagttgtacgacaacggcacctccttcgcaggaaacccgttcgccagccaaggtactatccaggcgcagatctggtcactggggcaccgtaacccgctaggcattgactgggacgctcagggacggctctgggaggtcgaaatggggcccatgggtggcgacgagctcaaccttatccaatcaggcgccaactacggctggccgctcgtgtgcgagggcaatcattacaacggcacgcaaatcccccgtcacagcacacgccccgatttcgcagcgcccaaggccttctgggtccccgttatctctccggccggattgatcatctacaaaggtgacttgttctcggcctggaagggcaatgctatcatcacaggtctcacttcaatggcaatcgtccgcgcaaccatcacgggtgacacggcgaaggaggctcagcgtatctcaatgggtaagcgaatgcgcggtatccgagaacattcagacggctctatttgggtgatcgaggacggtgctggcggccggctcttgaagcttacccctagctaaagcttcggccagcgagtgacacgggaggtttaggaccgtatgtacgtaaggtcgaattagaagagcagattacttcttaactttcagcgtgaaatcttttctttcaagtgcagttctataccgcgtggagtttgcgtcataacccggcctagttgtatcttaaaaaagatcgccaatttgccattgtgatagagaagcaattcgatatactcgggca

SEQ ID NO: 39765 - DNA, 1533 bp, Muscodor strobelii
  misc_feature: SGI cDNA ID NO. 573848
  misc_feature: Encodes the peptide sequence at SEQ ID NO 39766
atggcggcgcccgcaggagaagtaagcgacgtggcttcgcacattctccaagccctcgacaagtcgccgccgctcgtgtccaacgaagcttttccgtcactggacttcgtcagcctcaaagccgccctcgaccgccttgcctcgcggcgcatggtcgaatatgagactctccagcgagaagaagcatatctagaacctgaaggcgagcagatcgcctcccatggaagtcacgaagcccgtgtcttcgaagcattgcgcagcgctgtcgaggggctgtccatccaggacctcgagaagacaatcggcgacaagaacatctccaagctcggccagggcaacgccttcaagaacaaatggatagccaagaccaaagatggaaagctcaaggccgtcgccgaatcgataaccgataccgtccgagagcagctgctcacaatccagaacacccgcgcccttcccgacccgaaactcctcgccgacctcaagaagcgaaagctcgtccgagtccagaaggtcaatgacttcaaaatagccaaggggcccagctttgccctgcagatccccgaagaggctaccgacttgacggccgacatgctcgccaccggctcttggaagacggctactttcaagccctacaactttaacgccttaggtgcagagcaaggtgccggcgcactccaccccctgatgaaggtccgcaccgagatcaggaacatcttctttgagctgggcttcgaggagatgcttacggaaaacttcgttgaatcgagtttctggaacttcgacgcgctctttgtgccgcaacagcaccctgctcgcgacctacaagatactttctacgtctctaatcccaaggtagcaggcatgcctacggttgaggagaccacagacgagccatactgggacaacgtcaaggctgtgcacgaaaatggtaaatacggttcgattgggtaccgctatccttggtccgcagacgaggccacgagattagtcttgcgaacacacacaacggctgtcagtgccaacgtgctgcagagactcgcaaccaacaggggccccgatggacggcctccacctgcgcgttacttctcgattgatcgtgttttccgcaatgaaactgtcgacaacacgcacttggcagagttccaccaggtagagggaattatcgctgattatgatttgactcttggcggtctcatggagttcatggacgtcttcttcggcaagatgggactcacaggcctcaaatacaagccagcatacaacccctacacggagccgagtatggaaatcttctcgtggcacgccggtttgggcaaactcgtcgagataggaaacagtggaatgttccgaccagaaatgctcgaagcaatgggtttgccaagagagatgcgagtgttcggttggggtctgtcattagagcgtcccacgatgatccggtatggtatcaacaatatacgcgacttgttgggccacaaggtcgatctcaacttcgtagaaagaaatcccgccgttagattaggaaaagcttag

SEQ ID NO: 39766 - protein, 510 aa, Muscodor strobelii
  misc_feature: SGI Peptide ID NO. 573848
  misc_feature (211)..(502): Pfam Id: PF01409 Pfam Desc: tRNA synthetases class II core domain (F)
  misc_feature (1)..(509): NCBI GI: 85083247 Blast Desc: phenylalanyl-tRNA synthetase alpha chain [Neurospora crassa OR74A] gi|28881380|emb|CAD70421.1| phenylalanine--tRNA ligase beta chain [Neurospora crassa] gi|28918166|gb|EAA27845.1|
  misc_feature (2)..(509): NCBI GI: 256735129 Blast Desc: [Nectria haematococca mpVI 77-13-4]
  misc_feature (2)..(509): NCBI GI: 46108444 Blast Desc: FG01104.1 [Gibberella zeae PH-1]
  misc_feature (6)..(509): NCBI GI: 39944886 Blast Desc: MGG_04425 [Magnaporthe grisea 70-15] gi|145021555|gb|EDK05684.1| MGG_04425 [Magnaporthe grisea 70-15]
  misc_feature (9)..(509): NCBI GI: 156057419 Blast Desc: phenylalanyl-tRNA synthetase alpha chain [Sclerotinia sclerotiorum 1980] gi|154702226|gb|EDO01965.1| phenylalanyl-tRNA synthetase alpha chain [Sclerotinia sclerotiorum 1980]
  misc_feature (51)..(509): NCBI GI: 261356101 Blast Desc: phenylalanyl-tRNA synthetase alpha chain [Verticillium albo-atrum VaMs.102]
  misc_feature (9)..(483): NCBI GI: 154324168 Blast Desc: BC1G_00483 [Botryotinia fuckeliana B05.10] gi|150842712|gb|EDN17905.1| BC1G_00483 [Botryotinia fuckeliana B05.10]
  misc_feature (5)..(509): NCBI GI: 171686326 Blast Desc: protein product [Podospora anserina] gi|170943124|emb|CAP68777.1| protein product [Podospora anserina]
  misc_feature (8)..(509): NCBI GI: 226287249 Blast Desc: phenylalanyl-tRNA synthetase alpha chain [Paracoccidioides brasiliensis Pb18]
  misc_feature (9)..(509): NCBI GI: 226279193 Blast Desc: phenylalanyl-tRNA synthetase alpha chain [Paracoccidioides brasiliensis Pb01]
  misc_feature (8)..(507): SWISSPROT Homolog: EC 6.1.1.20 Phenylalanine--tRNA ligase
MAAPAGEVSDVASHILQALDKSPPLVSNEAFPSLDFVSLKAALDRLASRRMVEYETLQREEAYLEPEGEQIASHGSHEARVFEALRSAVEGLSIQDLEKTIGDKNISKLGQGNAFKNKWIAKTKDGKLKAVAESITDTVREQLLTIQNTRALPDPKLLADLKKRKLVRVQKVNDFKIAKGPSFALQIPEEATDLTADMLATGSWKTATFKPYNFNALGAEQGAGALHPLMKVRTEIRNIFFELGFEEMLTENFVESSFWNFDALFVPQQHPARDLQDTFYVSNPKVAGMPTVEETTDEPYWDNVKAVHENGKYGSIGYRYPWSADEATRLVLRTHTTAVSANVLQRLATNRGPDGRPPPARYFSIDRVFRNETVDNTHLAEFHQVEGIIADYDLTLGGLMEFMDVFFGKMGLTGLKYKPAYNPYTEPSMEIFSWHAGLGKLVEIGNSGMFRPEMLEAMGLPREMRVFGWGLSLERPTMIRYGINNIRDLLGHKVDLNFVERNPAVRLGKA

SEQ ID NO: 39767 - DNA, 2160 bp, Muscodor strobelii
  misc_feature: SGI EST ID NO. CUFF.96094.0
  misc_feature: Variant of the nucleotide sequence at SEQ ID NO 39765
tcgatatttggtggactttggagtatatttcgggaagtatgtgtgggagcttaatgtaagtggatttggcatcatagacatagcgggagcatacgaccagccaaaccgcattgagtatttcgtactatgctaggtaatgcagaagtaagttcttgaagtggattgtaaagcatccgagtctggtcatctgctccgtgccgtacgccgccagtacacttgtgaggtatctaataatgttctatcagagcttctaaaaggcttgcgtgaaacatggcggctgtcaattgacagaaggatgttcgttgacagtacagtaggggacacgcagcgggattggtagcaaagcgggtttggcggggtactgatgcttgttcctggacggtcagtgtcagagacaggtaccttggtagcaaacaccccaccaggccggcggaaaaccggggccctgccaccatcaccacaggtccctttggaggggttcaacttttcctggccgaaactcgtgactcacctgcgcatatcagatcagacctttcacaccttcgactctgcgcgcgcgagataacagcatccgtgtcgacgatggcggcgcccgcaggagaagtaagcgacgtggcttcgcacattctccaagccctcgacaagtcgccgccgctcgtgtccaacgaagcttttccgtcactggacttcgtcagcctcaaagccgccctcgaccgccttgcctcgcggcgcatggtcgaatatgagactctccagcgagaagaagcatatctagaacctgaaggcgagcagatcgcctcccatggaagtcacgaagcccgtgtcttcgaagcattgcgcagcgctgtcgaggggctgtccatccaggacctcgagaagacaatcggcgacaagaacatctccaagctcggccagggcaacgccttcaagaacaaatggatagccaagaccaaagatggaaagctcaaggccgtcgccgaatcgataaccgataccgtccgagagcagctgctcacaatccagaacacccgcgcccttcccgacccgaaactcctcgccgacctcaagaagcgaaagctcgtccgagtccagaaggtcaatgacttcaaaatagccaaggggcccagctttgccctgcagatccccgaagaggctaccgacttgacggccgacatgctcgccaccggctcttggaagacggctactttcaagccctacaactttaacgccttaggtgcagagcaaggtgccggcgcactccaccccctgatgaaggtccgcaccgagatcaggaacatcttctttgagctgggcttcgaggagatgcttacggaaaacttcgttgaatcgagtttctggaacttcgacgcgctctttgtgccgcaacagcaccctgctcgcgacctacaagatactttctacgtctctaatcccaaggtagcaggcatgcctacggttgaggagaccacagacgagccatactgggacaacgtcaaggctgtgcacgaaaatggtaaatacggttcgattgggtaccgctatccttggtccgcagacgaggccacgagattagtcttgcgaacacacacaacggctgtcagtgccaacgtgctgcagagactcgcaaccaacaggggccccgatggacggcctccacctgcgcgttacttctcgattgatcgtgttttccgcaatgaaactgtcgacaacacgcacttggcagagttccaccaggtagagggaattatcgctgattatgatttgactcttggcggtctcatggagttcatggacgtcttcttcggcaagatgggactcacaggcctcaaatacaagccagcatacaacccctacacggagccgagtatggaaatcttctcgtggcacgccggtttgggcaaactcgtcgagataggaaacagtggaatgttccgaccagaaatgctcgaagcaatgggtttgccaagagagatgcgagtgttcggttggggtctgtcattagagcgtcccacgatgatccggtatggtatcaacaatatacgcgacttgttgggccacaaggtcgatctcaacttcgtagaaagaaatcccgccgttagattaggaaaagcttagacgatgttgatacgatatgatatcatgctcaaaaacactctcgcc

SEQ ID NO: 39768 - DNA, 2262 bp, Muscodor strobelii
  misc_feature: SGI cDNA ID NO. 573849
  misc_feature: Encodes the peptide sequence at SEQ ID NO 39769
atggcgccaaaccctatcatcataccccgcaaaccggtttctcgccccgtgtctcaggaccggggcgctcgccgcacgacagcgagtcacggcacgacatttattgcgacgtcggtattggctgtcttagtcgcgacaacgcactgggcacgccgatgggtattgtctggtgctgccatcgaaagcttattggttctgtatgctaatggacatccgactattggaaggatactccctgctgcaccactatggtcgttgttgtcgacgctgaatctgatttatgttgtttgttcgacaagttggcttctttatggcgcttttacggcgacttgttggttcgcaatctcgttgactagtctcgcgcagtttcctatcgcgggacatttgtgtagacagacactgcgaaagaccctcggcaaggatccttatttcataagggatagactggcgttgtttaatctaccggccttggagattgatacggatgttgatgggttgtttgtcattcgaggtgtgacgattagtctttcgtcgctcactatcattgcacatggtgttgaggtcgggatcaagatcacgaatgacattgagctcgctctttgcgtcgatgaggttacagtcaggttgttccgcgacattgaaattggcgatgtgtatgccaatgtcaaaggcggcaagtttgagatgacattcggggagatggaggacgatcctcttgacgataatatcagcgtggatagcctgttcctcgacgatacaccattgctccgcgctgctagcgcaggactaggaggcttcaaggataggccgaaacttagagagtccctgaccagaggaagcttcatcaaagactcgtctgttcaggatggatacaatggtgtcaccaagctctcgcctgaggacgaggtcgccgaccaggagtaccgccagagactgacggaaatacggacctctagtcccatttatcaatcaagacagcacgcccgacgaagagcgaagcaggacaaagagttcaacttgaacgatgagaaagctttacgagccgctgtctcacaagagctacatactctaccatccgtggcacatccgccgccccggtctgtgcgcgtcactacccttcagaatatgtcatcgccgtctatgaaacgattcatgcatcgactgccgttcctccttcggcttcttcttgcaccgctgagctatttccatccaatccacattcactcgatcaatgttgcaggttctggacaatgggtatcagaattgttgcaacaggaagtcttcaagtcatacttggagacaagcgcagagctacgtcgacttcatcgaaaagtctccagttggctggcaaacgcgacgttctgcgtgcagctcaccgatattgacggtctcggatctgttcctttaagtacagcatttgacattgtcacatacttgaagttcaatgacgtgatggcatatcgaacagcgacccagtccggcacgaacatccaggtagtgcgtcttggcggtgctgacgctactttcaccattccgacctttctgttgccgcatcacgagcatcttgtaccgcctaagcccacagcagatgataagcacgatctcaaagttgaggtcaaagaagcagacgggctgccaaagaccgtcgaagctgaacaagagcttataaaggctaagaaggatgagactgcaatagcaatgagtgttcatgccagcttgcctgctagcttcgatcagacgttgctgaacttcattgctgcactcattaaagcaaccaagatcattgaaatggagaaggaggttgcagatgtcgactcaacaactgcctctaccagaactagcgttgacagccgtcgtccggccgtaatcaccaacagcgaagatcgtccgacctctcctattaccagcgacgacgacactagtagtgttgatactaccactaccaccaagtcaaaacttagcctcaaagaagtcgcaggcttcaagaccgtggcaagaaatatccggcagaacctcaaagatgggtcatataatacatcgatcaaggagtttgcgaaggagcttcatcaaaataccaaagacggcatgaagaaggcgatggtaggcggtcttgtgaatgatcgatggatcgcgaagatcgttggcaagactgcgtcagcgttacagaaggcacagggtgatgtggggtatagtggtgaaatccctataccgctcgtaccgtatagaggggaagaggacatgccatcaaagttattgccgtag

SEQ ID NO: 39769 - protein, 753 aa, Muscodor strobelii
  misc_feature: SGI Peptide ID NO. 573849
  misc_feature (93)..(753): NCBI GI: 189205451 Blast Desc: conserved [Pyrenophora tritici-repentis Pt-1C-BFP] gi|187975153|gb|EDU41779.1| conserved [Pyrenophora tritici-repentis Pt-1C-BFP]
  misc_feature (111)..(429): NCBI GI: 156064775 Blast Desc: [Sclerotinia sclerotiorum 1980] gi|154691257|gb|EDN90995.1| [Sclerotinia sclerotiorum 1980]
  misc_feature (49)..(355): NCBI GI: 169602078 Blast Desc: SNOG_03916 [Phaeosphaeria nodorum SN15] gi|111068001|gb|EAT89121.1| SNOG_03916 [Phaeosphaeria nodorum SN15]
  misc_feature (481)..(753): NCBI GI: 169602076 Blast Desc: SNOG_03915 [Phaeosphaeria nodorum SN15] gi|111068000|gb|EAT89120.1| SNOG_03915 [Phaeosphaeria nodorum SN15]
  misc_feature (433)..(746): NCBI GI: 156064775 Blast Desc: [Sclerotinia sclerotiorum 1980] gi|154691257|gb|EDN90995.1| [Sclerotinia sclerotiorum 1980]
  misc_feature (688)..(745): NCBI GI: 154322803 Blast Desc: [Botryotinia fuckeliana B05.10] gi|150848078|gb|EDN23271.1| [Botryotinia fuckeliana B05.10]
MAPNPIIIPRKPVSRPVSQDRGARRTTASHGTTFIATSVLAVLVATTHWARRWVLSGAAIESLLVLYANGHPTIGRILPAAPLWSLLSTLNLIYVVCSTSWLLYGAFTATCWFAISLTSLAQFPIAGHLCRQTLRKTLGKDPYFIRDRLALFNLPALEIDTDVDGLFVIRGVTISLSSLTIIAHGVEVGIKITNDIELALCVDEVTVRLFRDIEIGDVYANVKGGKFEMTFGEMEDDPLDDNISVDSLFLDDTPLLRAASAGLGGFKDRPKLRESLTRGSFIKDSSVQDGYNGVTKLSPEDEVADQEYRQRLTEIRTSSPIYQSRQHARRRAKQDKEFNLNDEKALRAAVSQELHTLPSVAHPPPRSVRVTTLQNMSSPSMKRFMHRLPFLLRLLLAPLSYFHPIHIHSINVAGSGQWVSELLQQEVFKSYLETSAELRRLHRKVSSWLANATFCVQLTDIDGLGSVPLSTAFDIVTYLKFNDVMAYRTATQSGTNIQVVRLGGADATFTIPTFLLPHHEHLVPPKPTADDKHDLKVEVKEADGLPKTVEAEQELIKAKKDETAIAMSVHASLPASFDQTLLNFIAALIKATKIIEMEKEVADVDSTTASTRTSVDSRRPAVITNSEDRPTSPITSDDDTSSVDTTTTTKSKLSLKEVAGFKTVARNIRQNLKDGSYNTSIKEFAKELHQNTKDGMKKAMVGGLVNDRWIAKIVGKTASALQKAQGDVGYSGEIPIPLVPYRGEEDMPSKLLP

SEQ ID NO: 39770 - DNA, 1488 bp, Muscodor strobelii
  misc_feature: SGI EST ID NO. CUFF.96055.0
  misc_feature: Variant of the nucleotide sequence at SEQ ID NO 39768
gccaaaccctatcatcataccccgcaaaccggtttctcgccccgtgtctcaggaccggggcgctcgccgcacgacagcgagtcacggcacgacatttattgcgacgtcggtattggctgtcttagtcgcgacaacgcactgggcacgccgatgggtattgtctggtgctgccatcgaaagcttattggttctgtatgctaatggacatccgactattggaaggatactccctgctgcaccactatggtcgttgttgtcgacgctgaatctgatttatgttgtttgttcgacaagttggcttctttatggcgcttttacggcgacttgttggttcgcaatctcgttgactagtctcgcgcagtttcctatcgcgggacatttgtgtagacagacactgcgaaagaccctcggcaaggatccttatttcataagggatagactggcgttgtttaatctaccggccttggagattgatacggatgttgatgggttgtttgtcattcgaggtgtgacgattagtctttcgtcgctcactatcattgcacatggtgttgaggtcgggatcaagatcacgaatgacattgagctcgctctttgcgtcgatgaggttacagtcaggttgttccgcgacattgaaattggcgatgtgtatgccaatgtcaaaggcggcaagtttgagatgacattcggggagatggaggacgatcctcttgacgataatatcagcgtggatagcctgttcctcgacgatacaccattgctccgcgctgctagcgcaggactaggaggcttcaaggataggccgaaacttagagagtccctgaccagaggaagcttcatcaaagactcgtctgttcaggatggatacaatggtgtcaccaagctctcgcctgaggacgaggtcgccgaccaggagtaccgccagagactgacggaaatacggacctctagtcccatttatcaatcaagacagcacgcccgacgaagagcgaagcaggacaaagagttcaacttgaacgatgagaaagctttacgagccgctgtctcacaagagctacatactctaccatccgtggcacatccgccgccccggtctgtgcgcgtcactacccttcagaatatgtcatcgccgtctatgaaacgattcatgcatcgactgccgttcctccttcggcttcttcttgcaccgctgagctatttccatccaatccacattcactcgatcaatgttgcaggttctggacaatgggtatcagaattgttgcaacaggaagtcttcaagtcatacttggagacaagcgcagagctacgtcgacttcatcgaaaagtctccagttggctggcaaacgcgacgttctgcgtgcagctcaccgatattgacggtctcggatctgttcctttaagtacagcatttgacattgtcacatacttgaagttcaatgacgtgatggcatatcgaacagcgacccagtccggcacgaacatcca

SEQ ID NO: 39771 - DNA, 867 bp, Muscodor strobelii
  misc_feature: SGI cDNA ID NO. 573850
  misc_feature: Elevated expression when VOC is produced
  misc_feature: Encodes the peptide sequence at SEQ ID NO 39772
atgcgtacagctatatccgctctgccagcactggctctcgcctctggtgtttctgctgcttgtaacggccaggatgcgtactgcagccggaagtacagcgatgtcacgttcattgggacgcacaactcagcctttgttggtgaattgccaacccagaatcagctcgaatctgttgaggatcaacttggcatggggattcggttcatgacgactcaaactcacgacaaggacggcactatcgagaattgtcatacgtcctgtattgaagaggatgccggtgctctggtggactacctatccacggtcaagtcattcctaggcgccaatggcaatgaagtagtgacattgctcatcacgaacggcgacggtatcgatatcaacaagtacaatgatgcttatgtttcgtccggaattgatcaatatgcttttacaccggatggccaacttggcatggacgactggccaactcttcaggatctgatctcagctggaaccaggctcgttacattcatggactatcatgccgatacttccaaggttccttacattctcgacgagttttcgtacttcttcgagacgccattcgatccccaggcgactgatttgaatgattgtaacgttgaccgacccggcggttctggcgatggactcatgattcttgcaaatcacaaccttaattacgaacttttcggtgccataagcgtcccggacttggttcatgcatccactactaactcagtcgattcgatcaaggctcaagttaataactgcactaccctgcatggaagaatgacgaacgttgttcttgttgattatgcttctgttggtcaggtgattgatgctcaaaaccagctaaatggcctctga

SEQ ID NO: 39772 - protein, 288 aa, Muscodor strobelii
  misc_feature: SGI Peptide ID NO. 573850
  misc_feature (21)..(288): NCBI GI: 256731755 Blast Desc: NECHADRAFT_93629 [Nectria haematococca mpVI 77-13-4]
  misc_feature (19)..(288): NCBI GI: 238486538 Blast Desc: conserved [Aspergillus flavus NRRL3357] gi|220699386|gb|EED55725.1| conserved [Aspergillus flavus NRRL3357]
  misc_feature (19)..(288): NCBI GI: 169770975 Blast Desc: [Aspergillus oryzae RIB40] gi|83767816|dbj|BAE57955.1| protein product [Aspergillus oryzae]
  misc_feature (13)..(288): NCBI GI: 119189601 Blast Desc: CIMG_04848 [Coccidioides immitis RS]
  misc_feature (21)..(288): NCBI GI: 70990854 Blast Desc: conserved [Aspergillus fumigatus Af293] gi|66847908|gb|EAL88238.1| conserved [Aspergillus fumigatus Af293] gi|159130749|gb|EDP55862.1| conserved [Aspergillus A1163]
  misc_feature (21)..(288): NCBI GI: 240111180 Blast Desc: CPC735_070150 [Coccidioides posadasii C735 delta SOWgp]
  misc_feature (21)..(288): NCBI GI: 119496735 Blast Desc: NFIA_019480 [Neosartorya fischeri NRRL 181] gi|119413303|gb|EAW23244.1| conserved [Neosartorya fischeri NRRL 181]
  misc_feature (19)..(288): NCBI GI: 145229145 Blast Desc: An01g04530 [Aspergillus niger] gi|134054981|emb|CAK36989.1| protein product [Aspergillus niger]
  misc_feature (6)..(288): NCBI GI: 238843541 Blast Desc: conserved [Microsporum canis CBS 113480]
  misc_feature (9)..(288): NCBI GI: 121702743 Blast Desc: conserved [Aspergillus clavatus NRRL 1] gi|119397779|gb|EAW08210.1| conserved [Aspergillus clavatus NRRL 1]
  misc_feature: Useful for introducing or modulating the production of volatile compounds
MRTAISALPALALASGVSAACNGQDAYCSRKYSDVTFIGTHNSAFVGELPTQNQLESVEDQLGMGIRFMTTQTHDKDGTIENCHTSCIEEDAGALVDYLSTVKSFLGANGNEVVTLLITNGDGIDINKYNDAYVSSGIDQYAFTPDGQLGMDDWPTLQDLISAGTRLVTFMDYHADTSKVPYILDEFSYFFETPFDPQATDLNDCNVDRPGGSGDGLMILANHNLNYELFGAISVPDLVHASTTNSVDSIKAQVNNCTTLHGRMTNVVLVDYASVGQVIDAQNQLNGL

SEQ ID NO: 39773 - DNA, 1479 bp, Muscodor strobelii
  misc_feature: SGI EST ID NO. CUFF.96070.0
  misc_feature: Variant of the nucleotide sequence at SEQ ID NO 39771
gccatgcattgctacagttgcctctttcatgcaaaagcttaagcttgtgtgtatttatatatatctagcacattctcgaacatgacgtttctcgacaagtctgacgagttgtgcaagagtcttcgacagacaattgcgaggtggcattgctcgcacctagcacacctcccggcgttgcagatcccaagtcttactcacggccagcttcaaccccttcatttgttcttatttgcttaagtcgcaacgaatcgggttctgtagagatgcgtacagctatatccgctctgccagcactggctctcgcctctggtgtttctgctgcttgtaacggccaggatgcgtactgcagccggaagtacagcgatgtcacgttcattgggacgcacaactcagcctttgttggtgaattgccaacccagaatcagctcgaatctgttgaggatcaacttggcatggggattcggttcatgacgactcaaactcacgacaaggacggcactatcgagaattgtcatacgtcctgtattgaagaggatgccggtgctctggtggactacctatccacggtcaagtcattcctaggcgccaatggcaatgaagtagtgacattgctcatcacgaacggcgacggtatcgatatcaacaagtacaatgatgcttatgtttcgtccggaattgatcaatatgcttttacaccggatggccaacttggcatggacgactggccaactcttcaggatctgatctcagctggaaccaggctcgttacattcatggactatcatgccgatacttccaaggttccttacattctcgacgagttttcgtacttcttcgagacgccattcgatccccaggcgactgatttgaatgattgtaacgttgaccgacccggcggttctggcgatggactcatgattcttgcaaatcacaaccttaattacgaacttttcggtgccataagcgtcccggacttggttcatgcatccactactaactcagtcgattcgatcaaggctcaagttaataactgcactaccctgcatggaagaatgacgaacgttgttcttgttgattatgcttctgttggtcaggtgattgatgctcaaaaccagctaaatggcctctgaaggtggagcaaagaccctacaacttgcccaggggagatccaagtggcagccaaaacaggtaatgaatattaagccaacacggctggattgaatttatcaagcaacgtcccaatttctccttggattcatgagtcagaatgacacaaatctatggccagttaggatagcgcattgaaacttgattgaagatgctgtcacgtaatggctcgtatatccgggttcttcaatacccatgactcgatatacgctatggaacgtaatacaggagctcaggtgtgtatacacgccaactcgttcgtcactttagtcgcaatttagttgatcccgggattcaaatcatctacacgag

SEQ ID NO: 39774 - DNA, 342 bp, Muscodor strobelii
  misc_feature: SGI cDNA ID NO. 573851
  misc_feature: Encodes the peptide sequence at SEQ ID NO 39775
atggtaatactggctaccactgtgacagtcacagaaacgacgtataccgttacaagcacgagcgtcacattgctccctacgcccgtggtgacagagaatgttattgccactctcaccgcaacagtgacaccaagaccatccaccgtgtgcagtgggcagaagcccggtgctaccatatcaatcaccctaccgcaggcaactattacgcagacaagcttggtatattccacgagccatgtcacaggcacagccaccgtcggcgaaacgacttacactgtgtcaacgaatacgaagagcgcgagtagctgctggaaaggcggaggctggatgggcgcagattga

SEQ ID NO: 39775 - protein, 113 aa, Muscodor strobelii
  misc_feature: SGI Peptide ID NO. 573851
MVILATTVTVTETTYTVTSTSVTLLPTPVVTENVIATLTATVTPRPSTVCSGQKPGATISITLPQATITQTSLVYSTSHVTGTATVGETTYTVSTNTKSASSCWKGGGWMGAD

SEQ ID NO: 39776 - DNA, 1362 bp, Muscodor strobelii
  misc_feature: SGI cDNA ID NO. 573852
  misc_feature: Encodes the peptide sequence at SEQ ID NO 39777
atgttgttgtcttcggttaaacaccagctggttctggcaataatctcaggcctctctttagtgactgcgggtcagtcgcgcggtgacgacgcaacgaagaagagttcctttaatattaatacaaccgcatcgtcgatattcatttccccccagcgaaatcttggctttgccctcaacattccagagaattccacaaccgacctctacttctctcttgcattctcggccgggctctcttgggctgctattggtcttggtgcgagcaacatgaaaggcgatgcattgatcctcatggcatacccgtcagcgtcagggacaaacgttactttatcgccacgtcgcgtatccgatcactctgaacccgaatttgacgtggatattgacatccaggccttatcaggtaccggatttgtggacaacagcacattcgtgttcaatgggttgtgtagtaactgtcggaactggtctggaggaggacaaggaaagatcgatgttagcagcaccgcgcagtctatgatctacgctgttggcccaggaggtcacacccgtagcgatgatccacgtgaatcagtccgatatcactttagctacggcagtttcacgatggaccttgtccacgcaacagggactgcggccacacctgagataccccacaatgacaatgtcacatctgtcggtgttgtccagatgcttgcaaggacggggagtaaagacacaaaagcaagtctccacgcagtaatcatggtattcacgttcgtcgggctttaccctctgggcatcttgttattgagacttggtaactcagttcgctggcatgcgatcaaccagagcattgccattcttcttatgactacaggggcgattctcgggtttgtgctcagcacttcatacaataggtccaaatccttcaacactgcgcaccagattattggcatcttggtcttcgtatttggtttgggacagttttgtctcggttatttccaccatcggacctttaagaagacccaacaaacaacaaaactagcgcccgttcatgtatggtttggccggctcgtcatccttttaggagtcgcgaatggcttcaccgggttccctctcgctttggctgcgaactacaactgggcgcttctcgccattgtcctgctcgtcctcccagcgatttttatactactactctctaagaagcttctacaaacgctgtggcagaaaaggaaaatcgacgctaaagatgaaccgccaagtggctatgacatggagccctggcaacatgaccaacgaaatgaccaagggcatccagcttcaacaatctcggatcagccgcatcaatcgtatccaccgcaggccgtgagagaatatgtttaa

SEQ ID NO: 39777 - protein, 453 aa, Muscodor strobelii
  misc_feature: SGI Peptide ID NO. 573852
  misc_feature (1)..(425): NCBI GI: 154302585 Blast Desc: BC1G_09869 [Botryotinia fuckeliana B05.10] gi|150855358|gb|EDN30550.1| BC1G_09869 [Botryotinia fuckeliana B05.10]
  misc_feature (42)..(425): NCBI GI: 156055418 Blast Desc: SS1G_05061 [Sclerotinia sclerotiorum 1980] gi|154702845|gb|EDO02584.1| SS1G_05061 [Sclerotinia sclerotiorum 1980]
  misc_feature (45)..(439): NCBI GI: 145612137 Blast Desc: MGG_08120 [Magnaporthe grisea 70-15] gi|145019365|gb|EDK03593.1| MGG_08120 [Magnaporthe grisea 70-15]
  misc_feature (43)..(446): NCBI GI: 46137335 Blast Desc: FG10183.1 [Gibberella zeae PH-1]
  misc_feature (40)..(446): NCBI GI: 256731756 Blast Desc: NECHADRAFT_93630 [Nectria haematococca mpVI 77-13-4]
  misc_feature (37)..(387): NCBI GI: 121714503 Blast Desc: conserved [Aspergillus clavatus NRRL 1] gi|119403016|gb|EAW13436.1| conserved [Aspergillus clavatus NRRL 1]
  misc_feature (40)..(444): NCBI GI: 115449389 Blast Desc: [Aspergillus terreus NIH2624] gi|114187543|gb|EAU29243.1| [Aspergillus terreus NIH2624]
  misc_feature (53)..(364): NCBI GI: 242795313 Blast Desc: conserved [Talaromyces stipitatus ATCC 10500] gi|218719147|gb|EED18567.1| conserved [Talaromyces stipitatus ATCC 10500]
  misc_feature (38)..(364): NCBI GI: 212536280 Blast Desc: conserved [Penicillium marneffei ATCC 18224] gi|210070695|gb|EEA24785.1| conserved [Penicillium marneffei ATCC 18224]
  misc_feature (40)..(413): NCBI GI: 212537061 Blast Desc: conserved [Penicillium marneffei ATCC 18224] gi|210068428|gb|EEA22519.1| conserved [Penicillium marneffei ATCC 18224]
MLLSSVKHQLVLAIISGLSLVTAGQSRGDDATKKSSFNINTTASSIFISPQRNLGFALNIPENSTTDLYFSLAFSAGLSWAAIGLGASNMKGDALILMAYPSASGTNVTLSPRRVSDHSEPEFDVDIDIQALSGTGFVDNSTFVFNGLCSNCRNWSGGGQGKIDVSSTAQSMIYAVGPGGHTRSDDPRESVRYHFSYGSFTMDLVHATGTAATPEIPHNDNVTSVGVVQMLARTGSKDTKASLHAVIMVFTFVGLYPLGILLLRLGNSVRWHAINQSIAILLMTTGAILGFVLSTSYNRSKSFNTAHQIIGILVFVFGLGQFCLGYFHHRTFKKTQQTTKLAPVHVWFGRLVILLGVANGFTGFPLALAANYNWALLAIVLLVLPAIFILLLSKKLLQTLWQKRKIDAKDEPPSGYDMEPWQHDQRNDQGHPASTISDQPHQSYPPQAVREYV

SEQ ID NO: 39778 - DNA, 1678 bp, Muscodor strobelii
  misc_feature: SGI EST ID NO. CUFF.96083.0
  misc_feature: Variant of the nucleotide sequence at SEQ ID NO 39776
cttaaacctacactcggatttttgttgatcaattacattccaaggacgaattttctttatcacctggcccgagcataccaaagaccaaatgttgttgtcttcggttaaacaccagctggttctggcaataatctcaggcctctctttagtgactgcgggtcagtcgcgcggtgacgacgcaacgaagaagagttcctttaatattaatacaaccgcatcgtcgatattcatttccccccagcgaaatcttggctttgccctcaacattccagagaattccacaaccgacctctacttctctcttgcattctcggccgggctctcttgggctgctattggtcttggtgcgagcaacatgaaaggcgatgcattgatcctcatggcatacccgtcagcgtcagggacaaacgttactttatcgccacgtcgcgtatccgatcactctgaacccgaatttgacgtggatattgacatccaggccttatcaggtaccggatttgtggacaacagcacattcgtgttcaatgggttgtgtagtaactgtcggaactggtctggaggaggacaaggaaagatcgatgttagcagcaccgcgcagtctatgatctacgctgttggcccaggaggtcacacccgtagcgatgatccacgtgaatcagtccgatatcactttagctacggcagtttcacgatggaccttgtccacgcaacagggactgcggccacacctgagataccccacaatgacaatgtcacatctgtcggtgttgtccagatgcttgcaaggacggggagtaaagacacaaaagcaagtctccacgcagtaatcatggtattcacgttcgtcgggctttaccctctgggcatcttgttattgagacttggtaactcagttcgctggcatgcgatcaaccagagcattgccattcttcttatgactacaggggcgattctcgggtttgtgctcagcacttcatacaataggtccaaatccttcaacactgcgcaccagattattggcatcttggtcttcgtatttggtttgggacagttttgtctcggttatttccaccatcggacctttaagaagacccaacaaacaacaaaactagcgcccgttcatgtatggtttggccggctcgtcatccttttaggagtcgcgaatggcttcaccgggttccctctcgctttggctgcgaactacaactgggcgcttctcgccattgtcctgctcgtcctcccagcgatttttatactactactctctaagaagcttctacaaacgctgtggcagaaaaggaaaatcgacgctaaagatgaaccgccaagtggctatgacatggagccctggcaacatgaccaacgaaatgaccaagggcatccagcttcaacaatctcggatcagccgcatcaatcgtatccaccgcaggccgtgagagaatatgtttaagtcaagcaatagttagataataagtccgaattgaaaatactggaaatgcatacaaatgagaacacgcaactgtctcgtttcaattttccgataacctcgagtacatctgaaggcagcgagacagtagagctgtgcccgatgtagcaatcaacaacgtcacgatagaagtgagaagagatggggaatctacatgtatgctgggatatacataaagatgagtattcggta

SEQ ID NO: 39779 - DNA, 2127 bp, Muscodor strobelii
  misc_feature: SGI cDNA ID NO. 573853
  misc_feature: Encodes the peptide sequence at SEQ ID NO 39780
atgaacgatccgctcctccctgccgctccaagcgacaccagcgccagaaagcgtccgacatccctcgagaccccgcctatgaagtgctgttgtggctctgttgagtgtgtcttcctgagacacaactactccgtcctcgataacgttgagaaagatgtccatcaggccgcacgtatgggacaggcactacttgctcggcacgaagcatacatggccgacgctgagcgcgaccgatccgaattgacctcgcggatcgagcagcttgaggcagacaacaaagagctggaggtcgtgaatgcaaaaacgattgaggagaacaggacgctactagatcaacttgaagcgctcaacactaccgtccacgactccgagggccatattaagtccctggaagccacgttgctatcctcgcagcaaaccatccgtcgccttgaagcggagacagcacgggcagaagcactggagcgccagatcgctacattagaactggaacaggctgagctccagggaacgctgtcgctctcacgcgaagaagccagatccgctatctcaagatggaaacgagcagagagaggtatcaacgaccttcaggaacaattggagcgcattgagaaagaagcctttgaagagagggaacatcacgtcgagatgatgggccgtattgagaagcagcgagaaatggaaaaggagctcaatacagcagccgggcgattgaagggcgcagccgcggcaaaatctctcaaccaagcaaacggaggcagtaatgtcgttggtcacttcgtacgcgatttactgcatgataatgccaacttacaacacggcattgccgaactgcgagagttgctcatgaattcaaatgacgagatccaagcgctgagagatcaactggagtatcatcaacctctaggggacggggaaaccagcgcaacgccaactttacgagctgaacttgagccgaatggctctccacttagggacgacgacaaatcaccgaccaaggtgtctcaagagttacacatacatcatcattaccacgtatcggcaccaaaacctgaacagaggaagccgaaaaagaaacgcttgggactcacacccggtgttttcataccacctaccacattacaccccagcacaccaccgaatggggtgatgcggcatgcttcagattcacacgcgcagagagatcctatgcaatctatgcattcgaaccgctggtcaacgttctccgagcaaccatccgaattcgcagcatcttcagctccgagttcacctcgatccaataacagaaattccgtgtttgacccgccatctggatcgtttcccgcatcgccgaccacaagcattgatccattatccccgcgatggcgacctgtccacaagagacagccttccaatatgtcctcacgcagctttcaagtccccacgagttttccctttggcccagctctcgcttcaattgctcatcctatcgttgaagagacagacggcatgatatctacaactgacgattctgtggcggatgacgaggattcatctagaggcttaggagtgttgcatgacgatagctcaattagtcatgacgagacagactcagactgcccgccggttggaagacttcgccgtactatgtctcatgagtctatcatgtcactgtctggtggacttgacattcatacgctcaaatccagaccaagccagcttactattcgtcagctgggatccgcctcttccgtcactggcagtagtatcgtgaccgcaagacccatgctgtcgcgggacaacgcaaaacgaagcagcgcccttctccgcgacagttacggcacttcgcccataggcagcttgcgatctgtctccaacccagttggaccagtgcggcctgaaacatccaagctcgggcgatgggttggatggcgcccctggggtggtggcgttgctggtgctcccatgcagaatgtgcgcgagaaagaccaccccaagcatctaggaaggtcgcccgggatcaaccagccgggcgctatacccggtttcacggaatttcttgtcgcagcgcaaaaaaggacgccaattggcaagacgatacccgatgatgtagatattgaggctcttgttgaggggctcagtgaatga

SEQ ID NO: 39780 - protein, 708 aa, Muscodor strobelii
  misc_feature: SGI Peptide ID NO. 573853
  misc_feature (27)..(640): NCBI GI: 261358539 Blast Desc: conserved [Verticillium albo-atrum VaMs.102]
  misc_feature (23)..(706): NCBI GI: 39946500 Blast Desc: MGG_08261 [Magnaporthe grisea 70-15] gi|145020100|gb|EDK04328.1| MGG_08261 [Magnaporthe grisea 70-15]
  misc_feature (24)..(708): NCBI GI: 256725868 Blast Desc: NECHADRAFT_104861 [Nectria haematococca mpVI 77-13-4]
  misc_feature (27)..(708): NCBI GI: 46111105 Blast Desc: FG02434.1 [Gibberella zeae PH-1]
  misc_feature (2)..(677): NCBI GI: 85091596 Blast Desc: NCU09032 [Neurospora crassa OR74A] gi|28920373|gb|EAA29743.1| [Neurospora crassa OR74A]
  misc_feature (24)..(708): NCBI GI: 171677478 Blast Desc: protein product [Podospora anserina] gi|170936807|emb|CAP61465.1| protein product [Podospora anserina]
  misc_feature (61)..(651): NCBI GI: 116201129 Blast Desc: CHGG_08449 [Chaetomium globosum CBS 148.51] gi|88176967|gb|EAQ84435.1| CHGG_08449 [Chaetomium globosum CBS 148.51]
  misc_feature (27)..(708): NCBI GI: 156065709 Blast Desc: SS1G_00865 [Sclerotinia sclerotiorum 1980] gi|154691724|gb|EDN91462.1| SS1G_00865 [Sclerotinia sclerotiorum 1980]
  misc_feature (27)..(353): NCBI GI: 154304867 Blast Desc: BC1G_09019 [Botryotinia fuckeliana B05.10] gi|150853881|gb|EDN29073.1| BC1G_09019 [Botryotinia fuckeliana B05.10]
  misc_feature (22)..(708): NCBI GI: 258576839 Blast Desc: [Uncinocarpus reesii 1704] gi|237902867|gb|EEP77268.1| [Uncinocarpus reesii 1704]
MNDPLLPAAPSDTSARKRPTSLETPPMKCCCGSVECVFLRHNYSVLDNVEKDVHQAARMGQALLARHEAYMADAERDRSELTSRIEQLEADNKELEVVNAKTIEENRTLLDQLEALNTTVHDSEGHIKSLEATLLSSQQTIRRLEAETARAEALERQIATLELEQAELQGTLSLSREEARSAISRWKRAERGINDLQEQLERIEKEAFEEREHHVEMMGRIEKQREMEKELNTAAGRLKGAAAAKSLNQANGGSNVVGHFVRDLLHDNANLQHGIAELRELLMNSNDEIQALRDQLEYHQPLGDGETSATPTLRAELEPNGSPLRDDDKSPTKVSQELHIHHHYHVSAPKPEQRKPKKKRLGLTPGVFIPPTTLHPSTPPNGVMRHASDSHAQRDPMQSMHSNRWSTFSEQPSEFAASSAPSSPRSNNRNSVFDPPSGSFPASPTTSIDPLSPRWRPVHKRQPSNMSSRSFQVPTSFPFGPALASIAHPIVEETDGMISTTDDSVADDEDSSRGLGVLHDDSSISHDETDSDCPPVGRLRRTMSHESIMSLSGGLDIHTLKSRPSQLTIRQLGSASSVTGSSIVTARPMLSRDNAKRSSALLRDSYGTSPIGSLRSVSNPVGPVRPETSKLGRWVGWRPWGGGVAGAPMQNVREKDHPKHLGRSPGINQPGAIPGFTEFLVAAQKRTPIGKTIPDDVDIEALVEGLSE

SEQ ID NO: 39781 - DNA, 3910 bp, Muscodor strobelii
  misc_feature: SGI EST ID NO. CUFF.96086.0
  misc_feature: Variant of the nucleotide sequence at SEQ ID NO 39779
caggtcgggagtgtcgagccaggcattgccaggttcttatttgctagattcttactctgcaccccttctggcaggcctagagatcccaatgcggaatcatccatcatttgggctggctgggtgtgacctgttcatgtcggtaaggtgggacaatgacaacaaacctgcgggccgctgagcagtctgcagtacttgaacggagtattggtccagcctcttcatattttcttgagtatggtcctcatcccttggccacccttctgtagatcttctatcacatacgacaagacagactgtctgagacaatatgagaacatcttttgtttttctaccgatagtcggtacgctggaagatagtgtatcctatcatcgaagatccgaatgaggttggacgggactcaacccccaccttgatggttcctgtgactccacactgcctgacgcgagatccctggcgtccctggaggatagaagattacggtgtcgcaatttcacgattcacggcaggcttttctcaatactgcccctcagcgcgtcttcgccgacctgcagagcacagaggcaccggagtacgggttaagagacaggcggcaacgcaaaacaaataacggagagatagtgaatgtggaagaacaaaccttcaaggcgtcagcggcgtggctgctttttacagcaccagcggcacatttgcatcttttcgaaccttcttgtctgtcgcaacggctctactcctccctcgatgacgcctcatttcttcttctgaacttgtctgtggaccattgcgtcaagtgtgcagcatgcttgtcgcctatccgatctcgcccagcactcaacacatttcatctccaccattgccgccgccatgaacgatccgctcctccctgccgctccaagcgacaccagcgccagaaagcgtccgacatccctcgagaccccgcctatgaagtgctgttgtggctctgttgagtgtgtcttcctgagacacaactactccgtcctcgataacgttgagaaagatgtccatcaggccgcacgtatgggacaggcactacttgctcggcacgaagcatacatggccgacgctgagcgcgaccgatccgaattgacctcgcggatcgagcagcttgaggcagacaacaaagagctggaggtcgtgaatgcaaaaacgattgaggagaacaggacgctactagatcaacttgaagcgctcaacactaccgtccacgactccgagggccatattaagtccctggaagccacgttgctatcctcgcagcaaaccatccgtcgccttgaagcggagacagcacgggcagaagcactggagcgccagatcgctacattagaactggaacaggctgagctccagggaacgctgtcgctctcacgcgaagaagccagatccgctatctcaagatggaaacgagcagagagaggtatcaacgaccttcaggaacaattggagcgcattgagaaagaagcctttgaagagagggaacatcacgtcgagatgatgggccgtattgagaagcagcgagaaatggaaaaggagctcaatacagcagccgggcgattgaagggcgcagccgcggcaaaatctctcaaccaagcaaacggaggcagtaatgtcgttggtcacttcgtacgcgatttactgcatgataatgccaacttacaacacggcattgccgaactgcgagagttgctcatgaattcaaatgacgagatccaagcgctgagagatcaactggagtatcatcaacctctaggggacggggaaaccagcgcaacgccaactttacgagctgaacttgagccgaatggctctccacttagggacgacgacaaatcaccgaccaaggtgtctcaagagttacacatacatcatcattaccacgtatcggcaccaaaacctgaacagaggaagccgaaaaagaaacgcttgggactcacacccggtgttttcataccacctaccacattacaccccagcacaccaccgaatggggtgatgcggcatgcttcagattcacacgcgcagagagatcctatgcaatctatgcattcgaaccgctggtcaacgttctccgagcaaccatccgaattcgcagcatcttcagctccgagttcacctcgatccaataacagaaattccgtgtttgacccgccatctggatcgtttcccgcatcgccgaccacaagcattgatccattatccccgcgatggcgacctgtccacaagagacagccttccaatatgtcctcacgcagctttcaagtccccacgagttttccctttggcccagctctcgcttcaattgctcatcctatcgttgaagagacagacggcatgatatctacaactgacgattctgtggcggatgacgaggattcatctagaggcttaggagtgttgcatgacgatagctcaattagtcatgacgagacagactcagactgcccgccggttggaagacttcgccgtactatgtctcatgagtctatcatgtcactgtctggtggacttgacattcatacgctcaaatccagaccaagccagcttactattcgtcagctgggatccgcctcttccgtcactggcagtagtatcgtgaccgcaagacccatgctgtcgcgggacaacgcaaaacgaagcagcgcccttctccgcgacagttacggcacttcgcccataggcagcttgcgatctgtctccaacccagttggaccagtgcggcctgaaacatccaagctcgggcgatgggttggatggcgcccctggggtggtggcgttgctggtgctcccatgcagaatgtgcgcgagaaagaccaccccaagcatctaggaaggtcgcccgggatcaaccagccgggcgctatacccggtttcacggaatttcttgtcgcagcgcaaaaaaggacgccaattggcaagacgatacccgatgatgtagatattgaggctcttgttgaggggctcagtgaatgattatgtatcaggcgaatcacaaccaacaacacaaaaatcaccacggacaacagaatcatggctgctgattgattttcttcctatcattaccattcttgattttcctaacttatattggtcgttctgcgcgcttcgtctatgctttattgcaaggagttcatggaaggcaaccacattgccacacttggcttgaggcactgaaaccctttatgcggccttacagcaaaacagctctaccaggaacactttaccctactaaattaatcatgcgtctttccctatctttgggagcactaagacacccccgcaactgcgctccacgggctctcattctattacgtttcttctcactaactctctttcgttatttaaacagaggcatatatgcatacgcggcgttcatggaaggaggcaagttggaactgggccaaggcatgggcgggaggcgattccatggtaatatttctccacattggctcatgatactcttttgtgatccaggtttgtaccaggttggaaaggtggctcccagcggaacttagtggacgatacccaattcagtgtttatcatttctttttttccagatgtctgttgatcatctgtatatcaggggtgggcaactagtgttagctcgcgtacacacatagaaattatggagaattgcaccttctgagagatccttcgcatgtctttcgacttctgtatgctgtgagagcttcgagtcattctgtgcgtatcagcggaatcattcagaatgctcactagccacgtttcggcatacacgagagagtgcaatatagggagggccgtgggatactatggtttatttgttccatgtatcataatagggacggatattagaattcaactagaatcgtgcacgatccgatatctcacatattggttatattctgcatatt

SEQ ID NO: 39782 - DNA, 1854 bp, Muscodor strobelii
  misc_feature: SGI cDNA ID NO. 573854
  misc_feature: Encodes the peptide sequence at SEQ ID NO 39783
atgcacactgcccctccgtcgccgtcaccactgttgtatgagcagatgctgggtctgttgatggatgtcctgatatgggaaatcgatctggcatcgacaattctggtgcccgcgcccgcagtccaccgctctgccctgcaccacaagccaaaattttataatcagcacaaagagcatacactccaaacactccaacgtcgagctgctacttccaaagccatgtctgaattcaaactcaagggcgtctccacgctctcgttgcagcccggcgataaacaggaggttgaagtcgagggcattcaggacgccaaggtcctcctcgtcaatgctggcggaactatccaggcggttggccccaagtgcacgcattatggcgcgcccctcgttaacggcgtcttgaccaagtctggccggctgacttgtccatggcacggagcttgcttcaacgccaaaacaggcgatgtcgaagatgcccccgcgctcgattctatagccacctttaagcttgtcgagaaggaaggagctgtctttgtccaaggcgaagagtccctcatcaaggctgggagaagaaagcctaaattcacatgccgcgctaccagtggttccgactccgacaaagtggtcatcgtaggtggtggcagcggagccctcggcgcagtggaggcgctgagagagaaaggcttcactggccccgtcaccatcatttcaagcgaaggctacctacccatcgatcgaaccaagctgtccaaggccctgttgactgatccggccaaggcccaatggagagacgccgaatggttcaagtctggctcggtcgagttcgtccaggatgaggtgaccgacgttgatctgaacaacaaatccgttaccaccaagaacaatgcgaagcacagctacggcaaactcgtcttagccaccggtggctcgccccgtagcctgccactccagggattcaaagtcctcgagaacatcttcccgttgcgcaccttgcacgacacacagaagatcgttgaggctattggcgacaagggcaagaacatcgttatcatcggcagcagcttcatcggcatggaggtcgccaacgccaccgttgcagacaacactgtatcagtcgtgggtatggagagtgttccattggagagagtgatgggcaaggaggttggtgctggactgcagaagggcttggaaggaaaaggtgtcaagttttacatgtcggctagcgtcgaaaaggccgagccatctggatctgatccggccaaggtagggtcggtggtgttgaaagatggcaccaagctcgatgccgatctggttatccttggtgtcggtgttgcgccagcaaccgaattcttgaagggaaataaggtgattcgcctcgagcaagacggctcgttgaaaacggatgagaactttctcgtcacgggcctcaaggacgtatacgcaattggtgacattgcgtcttacccgtaccacggccctggtggacaaggcaacttcacgcgcatcgagcactggaacgtagcccaaaaccaaggtcgaacggtggcgaaccacatcgtgaacccgtctctcaaagccgaattcttcacgcctgtcttttggtcagctctgaccgggcaactgcgatactgcggaaacaccgtcaatggctgggacgatctagtgctgcagggcagtccggcagagggaaaatttgtcgcgttctacaccaagggtgaaatcgtggtcgctgtcgcaagcatgggagctgacccggccatggtcaagtcagcacagttgatgaaagatggtgctatgccatccaagtcgcagctgaaggatggactcgatattctcgacgtcgggttcccaaattga

SEQ ID NO: 39783 - protein, 617 aa, Muscodor strobelii
  misc_feature: SGI Peptide ID NO. 573854
  misc_feature (346)..(442): Pfam Id: PF00070 Pfam Desc: Pyridine nucleotide-disulphide oxidoreductase
  misc_feature (206)..(489): Pfam Id: PF07992 Pfam Desc: Pyridine nucleotide-disulphide oxidoreductase
  misc_feature (75)..(174): Pfam Id: PF00355 Pfam Desc: Rieske [2Fe-2S] domain
  misc_feature (105)..(174): Pfam Id: PF00355 Pfam Desc: Rieske [2Fe-2S] domain
  misc_feature (73)..(580): NCBI GI: 261358545 Blast Desc: monodehydroascorbate reductase [Verticillium albo-atrum VaMs.102]
  misc_feature (76)..(617): NCBI GI: 171677366 Blast Desc: protein product [Podospora anserina] gi|170936751|emb|CAP61409.1| protein product [Podospora anserina]
  misc_feature (76)..(617): NCBI GI: 39946498 Blast Desc: MGG_08262 [Magnaporthe grisea 70-15] gi|145020099|gb|EDK04327.1| MGG_08262 [Magnaporthe grisea 70-15]
  misc_feature (76)..(617): NCBI GI: 164425419 Blast Desc: NCU05850 [Neurospora crassa OR74A] gi|157070920|gb|EAA30605.2| NCU05850 [Neurospora crassa OR74A]
  misc_feature (76)..(611): NCBI GI: 256725866 Blast Desc: NECHADRAFT_44197 [Nectria haematococca mpVI 77-13-4]
  misc_feature (40)..(616): NCBI GI: 156065699 Blast Desc: SS1G_00860 [Sclerotinia sclerotiorum 1980] gi|154691719|gb|EDN91457.1| SS1G_00860 [Sclerotinia sclerotiorum 1980]
  misc_feature (76)..(616): NCBI GI: 154304889 Blast Desc: BC1G_09030 [Botryotinia fuckeliana B05.10] gi|150853892|gb|EDN29084.1| BC1G_09030 [Botryotinia fuckeliana B05.10]
  misc_feature (93)..(611): NCBI GI: 46111103 Blast Desc: FG02433.1 [Gibberella zeae PH-1]
  misc_feature (76)..(616): NCBI GI: 115385318 Blast Desc: conserved [Aspergillus terreus NIH2624] gi|114196898|gb|EAU38598.1| conserved [Aspergillus terreus NIH2624]
  misc_feature (76)..(617): NCBI GI: 116200905 Blast Desc: CHGG_08337 [Chaetomium globosum CBS 148.51] gi|88176855|gb|EAQ84323.1| CHGG_08337 [Chaetomium globosum CBS 148.51]
  misc_feature (204)..(578): SWISSPROT Homolog: EC 1.18.1.3 Ferredoxin--NAD(+) reductase
MHTAPPSPSPLLYEQMLGLLMDVLIWEIDLASTILVPAPAVHRSALHHKPKFYNQHKEHTLQTLQRRAATSKAMSEFKLKGVSTLSLQPGDKQEVEVEGIQDAKVLLVNAGGTIQAVGPKCTHYGAPLVNGVLTKSGRLTCPWHGACFNAKTGDVEDAPALDSIATFKLVEKEGAVFVQGEESLIKAGRRKPKFTCRATSGSDSDKVVIVGGGSGALGAVEALREKGFTGPVTIISSEGYLPIDRTKLSKALLTDPAKAQWRDAEWFKSGSVEFVQDEVTDVDLNNKSVTTKNNAKHSYGKLVLATGGSPRSLPLQGFKVLENIFPLRTLHDTQKIVEAIGDKGKNIVIIGSSFIGMEVANATVADNTVSVVGMESVPLERVMGKEVGAGLQKGLEGKGVKFYMSASVEKAEPSGSDPAKVGSVVLKDGTKLDADLVILGVGVAPATEFLKGNKVIRLEQDGSLKTDENFLVTGLKDVYAIGDIASYPYHGPGGQGNFTRIEHWNVAQNQGRTVANHIVNPSLKAEFFTPVFWSALTGQLRYCGNTVNGWDDLVLQGSPAEGKFVAFYTKGEIVVAVASMGADPAMVKSAQLMKDGAMPSKSQLKDGLDILDVGFPN

SEQ ID NO: 39784 - DNA, 2214 bp, Muscodor strobelii
  misc_feature: SGI EST ID NO. CUFF.96102.0
  misc_feature: Variant of the nucleotide sequence at SEQ ID NO 39782
gtcctgatatgggaaatcgatctggcatcgacaattctggtgcccggtccgtactactttttgtctgcacgtctacatgtaatctgcttgcgtgctcctcccacattatcatctgattcgccctcataacccgtttgtgcaccaccacttaccatctgctgcgtaatacccagttgcagcctctttgagcgttctcgatatccccaacgaccacttcccctcacctccagtgctttttctccattacttttcatgaatcctcgttgggcattcgtattgaaagcgcccgcagtccaccgctctgccctgcaccacaagccaaaattttataatcagcacaaagagcatacactccaaacactccaacgtcgagctgctacttccaaagccatgtctgaattcaaactcaagggcgtctccacgctctcgttgcagcccggcgataaacaggaggttgaagtcgagggcattcaggacgccaaggtcctcctcgtcaatgctggcggaactatccaggcggttggccccaagtgcacgcattatggcgcgcccctcgttaacggcgtcttgaccaagtctggccggctgacttgtccatggcacggagcttgcttcaacgccaaaacaggcgatgtcgaagatgcccccgcgctcgattctatagccacctttaagcttgtcgagaaggaaggagctgtctttgtccaaggcgaagagtccctcatcaaggctgggagaagaaagcctaaattcacatgccgcgctaccagtggttccgactccgacaaagtggtcatcgtaggtggtggcagcggagccctcggcgcagtggaggcgctgagagagaaaggcttcactggccccgtcaccatcatttcaagcgaaggctacctacccatcgatcgaaccaagctgtccaaggccctgttgactgatccggccaaggcccaatggagagacgccgaatggttcaagtctggctcggtcgagttcgtccaggatgaggtgaccgacgttgatctgaacaacaaatccgttaccaccaagaacaatgcgaagcacagctacggcaaactcgtcttagccaccggtggctcgccccgtagcctgccactccagggattcaaagtcctcgagaacatcttcccgttgcgcaccttgcacgacacacagaagatcgttgaggctattggcgacaagggcaagaacatcgttatcatcggcagcagcttcatcggcatggaggtcgccaacgccaccgttgcagacaacactgtatcagtcgtgggtatggagagtgttccattggagagagtgatgggcaaggaggttggtgctggactgcagaagggcttggaaggaaaaggtgtcaagttttacatgtcggctagcgtcgaaaaggccgagccatctggatctgatccggccaaggtagggtcggtggtgttgaaagatggcaccaagctcgatgccgatctggttatccttggtgtcggtgttgcgccagcaaccgaattcttgaagggaaataaggtgattcgcctcgagcaagacggctcgttgaaaacggatgagaactttctcgtcacgggcctcaaggacgtatacgcaattggtgacattgcgtcttacccgtaccacggccctggtggacaaggcaacttcacgcgcatcgagcactggaacgtagcccaaaaccaaggtcgaacggtggcgaaccacatcgtgaacccgtctctcaaagccgaattcttcacgcctgtcttttggtcagctctgaccgggcaactgcgatactgcggaaacaccgtcaatggctgggacgatctagtgctgcagggcagtccggcagagggaaaatttgtcgcgttctacaccaagggtgaaatcgtggtcgctgtcgcaagcatgggagctgacccggccatggtcaagtcagcacagttgatgaaagatggtgctatgccatccaagtcgcagctgaaggatggactcgatattctcgacgtcgggttcccaaattgactatcagggaagaaagataaggcgatgggagtcttggcgcacttgtaaatgacttgctcttctatcatgtattgacatttgctggaacacgaaatgacaatcttcatgttccatatcaatcgagtccggaatcaaacaaagactacatagcatcattgcagtttggagacgccgtgccaccatcgccgt

SEQ ID NO: 39785 - DNA, 1959 bp, Muscodor strobelii
  misc_feature: SGI cDNA ID NO. 573855
  misc_feature: Encodes the peptide sequence at SEQ ID NO 39786
atggagacaagctctcggcgtaaagcttgtgatctctgcttcaaaaagaagattcgttgtgatagtttgaaaccgtcctgctcaaactgctccttgtacaatgtcccatgtaaaaccactaccatacgcaggcgaccgcctgcaaaccaggcaccagcaccagtgactacatcagagccaaagctaaacaattccaaagtcgacgacactttggacgcccgccttgcgcgcattgaggctaagttggatggactgaaggatgctggacactcgctgagtcactttctcaacgagagtagcacagagacctcgccgaacgagagagtgacggagagttcatcatcgcctccatcccagtcatctggtgacgtggattggatcggtccgaggagtcgaaatgagccacttgtgccgcccatggctgaaatctttcctatcatagaggctttttttcgagattacaattccctgataccccttttcgaccagcagtcgttcatgcgtatgttcaacgactactacgctagacatggagaaactttgcggatttacgctgccgttatcaacgtcgtcgctgccatgggctaccgcgtcaaatatgccgtccatggcgatgcgacgcatgggttcgcggaggataagattaagagatgtgtcgacaacgcgcagatgatgttggacgagcttatgaccagagatcaagataccctcggtttgcaggctttgctaggacttgtcatactctttcagacacatcccgatcagacagcttcttcggtgctgctcagtgcggctgtgaggctagctcacagtttaagattggaaaacaagactttgctctcgggttactcgccgcaggaagctcgccaaagaaagaacatcttttgggtttgctattggctagataaagatatcagccttcgtactgtcacaccttcattacaagttgacgatgacatcgatatcgacttgcccggttccgatccagacgataattacagctttctgtccagcaaagacggtctgtcacaactcaacttttttcgagccaaggtccagttggcgcacatcgagggcaaaatatacgactctcttctcagcaatagatcaagaaagctctctccggaagctcgaaagcaagcggtcattcacatcgacaggctactcgagcgctggaaggaatccatccccgcgcctcttcatttgcgcaacatggccgacgtgctactgaacagccctcttattcacatgactgtgttgtatcagacatacctattatgcatgactatgcttcatggactctactcacccgacgcggcttggctgaaggctcttggcgcgcttggaagcgatctcatcagaacctttgcccctcggaattcagcatgcctcgacagtccctcgagctcgtctcctatggtgttggacaagtgcgtcaaaacgagccgtggtattctgaacctcctcgtgactcaggcatttggcggttgtaacgtatggctcagttcctgcgtttacttctcggccctcaccttcgtattcgtcaatctcatctaccatccaacattagacacagtccaggaagaccaagagctagcaaaggaatctatgtcgcggatggaaaaatattttgattaccgcggattcgagaagttccggcagctgcgccatgttctcatccaactgcaaggtgtctcagattcagttatcgagaaggccaagaccgaatcgttggacgatacgtctaagtatccttggtacatgggcttcttgccttcgctgcttccacctggtgacattttcgacacgagttttgatgatttggcacaacagccagaactcgttcaacctaacacaacgccggattggatgggagcagccaattttgaaacccactccatgaattggcccggtgcctcaggacctgggctcttctttggtggcatagggcctgcgtga

SEQ ID NO: 39786 - protein, 652 aa, Muscodor strobelii
  misc_feature: SGI Peptide ID NO. 573855
  misc_feature (8)..(46): Pfam Id: PF00172 Pfam Desc: Fungal Zn(2)-Cys(6) binuclear cluster domain
  misc_feature (235)..(331): Pfam Id: PF04082 Pfam Desc: Fungal specific transcription factor domain
  misc_feature (4)..(630): NCBI GI: 256725870 Blast Desc: NECHADRAFT_94663 [Nectria haematococca mpVI 77-13-4]
  misc_feature (4)..(569): NCBI GI: 46111099 Blast Desc: FG02431.1 [Gibberella zeae PH-1]
  misc_feature (3)..(562): NCBI GI: 261358544 Blast Desc: fungal specific transcription factor domain-containing protein [Verticillium albo-atrum VaMs.102]
  misc_feature (5)..(563): NCBI GI: 171677364 Blast Desc: protein product [Podospora anserina] gi|170936750|emb|CAP61408.1| protein product [Podospora anserina]
  misc_feature (1)..(561): NCBI GI: 238488159 Blast Desc: conserved [Aspergillus flavus NRRL3357] gi|220697705|gb|EED54045.1| conserved [Aspergillus flavus NRRL3357]
  misc_feature (55)..(532): NCBI GI: 46127023 Blast Desc: FG07889.1 [Gibberella zeae PH-1]
  misc_feature (137)..(533): NCBI GI: 256724498 Blast Desc: NECHADRAFT_54805 [Nectria haematococca mpVI 77-13-4]
  misc_feature (8)..(541): NCBI GI: 256725042 Blast Desc: NECHADRAFT_77135 [Nectria haematococca mpVI 77-13-4]
  misc_feature (18)..(555): NCBI GI: 256734978 Blast Desc: NECHADRAFT_75779 [Nectria haematococca mpVI 77-13-4]
  misc_feature (1)..(397): NCBI GI: 169762386 Blast Desc: [Aspergillus oryzae RIB40] gi|83770121|dbj|BAE60254.1| protein product [Aspergillus oryzae]
METSSRRKACDLCFKKKIRCDSLKPSCSNCSLYNVPCKTTTIRRRPPANQAPAPVTTSEPKLNNSKVDDTLDARLARIEAKLDGLKDAGHSLSHFLNESSTETSPNERVTESSSSPPSQSSGDVDWIGPRSRNEPLVPPMAEIFPIIEAFFRDYNSLIPLFDQQSFMRMFNDYYARHGETLRIYAAVINVVAAMGYRVKYAVHGDATHGFAEDKIKRCVDNAQMMLDELMTRDQDTLGLQALLGLVILFQTHPDQTASSVLLSAAVRLAHSLRLENKTLLSGYSPQEARQRKNIFWVCYWLDKDISLRTVTPSLQVDDDIDIDLPGSDPDDNYSFLSSKDGLSQLNFFRAKVQLAHIEGKIYDSLLSNRSRKLSPEARKQAVIHIDRLLERWKESIPAPLHLRNMADVLLNSPLIHMTVLYQTYLLCMTMLHGLYSPDAAWLKALGALGSDLIRTFAPRNSACLDSPSSSSPMVLDKCVKTSRGILNLLVTQAFGGCNVWLSSCVYFSALTFVFVNLIYHPTLDTVQEDQELAKESMSRMEKYFDYRGFEKFRQLRHVLIQLQGVSDSVIEKAKTESLDDTSKYPWYMGFLPSLLPPGDIFDTSFDDLAQQPELVQPNTTPDWMGAANFETHSMNWPGASGPGLFFGGIGPA

SEQ ID NO: 39787 - DNA, 3022 bp, Muscodor strobelii
  misc_feature: SGI EST ID NO. CUFF.96145.3
  misc_feature: Variant of the nucleotide sequence at SEQ ID NO 39785
tcagattctatcagatagactgaaagaaacatctatacatatcttcaatcccataaacctcattcgtacccgatagagttgtatttaaacgagtactccggtattgccttcctttcgcaaactcatcttattgtgaagaccacaggcgcctcccttgccatggagacaagctctcggcgtaaagtgagtcagttgtggcgtttctattcccatggacataccactcatccatcttcaggcttgtgatctctgcttcaaaaagaagattcgttgtgatagtttgaaaccgtcctgctcaaactgctccttgtacaatgtcccatgtaaaaccactaccatacgcaggcgaccgcctgcaaaccaggcaccagcaccagtgactacatcagagccaaagctaaacaattccaaagtcgacgacactttggacgcccgccttgcgcgcattgaggctaagttggatggactgaaggatgctggacactcgctgagtcactttctcaacgagagtagcacagagacctcgccgaacgagagagtgacggagagttcatcatcgcctccatcccagtcatctggtgacgtggattggatcggtccgaggagtcgaaatgagccacttgtgccgcccatggctgaaatctttcctatcatagaggctttttttcgagattacaattccctgataccccttttcgaccagcagtcgttcatgcgtatgttcaacgactactacgctagacatggagaaactttgcggatttacgctgccgttatcaacgtcgtcgctgccatgggctaccgcgtcaaatatgccgtccatggcgatgcgacgcatgggttcgcggaggataagattaagagatgtgtcgacaacgcgcagatgatgttggacgagcttatgaccagagatcaagataccctcggtttgcaggctttgctaggacttgtcatactctttcagacacatcccgatcagacagcttcttcggtgctgctcagtgcggctgtgaggctagctcacagtttaagattggaaaacaagactttgctctcgggttactcgccgcaggaagctcgccaaagaaagaacatcttttgggtttgctattggctagataaagatatcagccttcgtactgtcacaccttcattacaagttgacgatgacatcgatatcgacttgcccggttccgatccagacgataattacagctttctgtccagcaaagacggtctgtcacaactcaacttttttcgagccaaggtccagttggcgcacatcgagggcaaaatatacgactctcttctcagcaatagatcaagaaagctctctccggaagctcgaaagcaagcggtcattcacatcgacaggctactcgagcgctggaaggaatccatccccgcgcctcttcatttgcgcaacatggccgacgtgctactgaacagccctcttattcacatgactgtgttgtatcagacatacctattatgcatgactatgcttcatggactctactcacccgacgcggcttggctgaaggctcttggcgcgcttggaagcgatctcatcagaacctttgcccctcggaattcagcatgcctcgacagtccctcgagctcgtctcctatggtgttggacaagtgcgtcaaaacgagccgtggtattctgaacctcctcgtgactcaggcatttggcggttgtaacgtatggctcagttcctgcgtttacttctcggccctcaccttcgtattcgtcaatctcatctaccatccaacattagacacagtccaggaagaccaagagctagcaaaggaatctatgtcgcggatggaaaaatattttgattaccgcggattcgagaagttccggcagctgcgccatgttctcatccaactgcaaggtgtctcagattcagttatcgagaaggccaagaccgaatcgttggacgatacgtctaagtatccttggtacatgggcttcttgccttcgctgcttccacctggtgacattttcgacacgagttttgatgatttggcacaacagccagaactcgttcaacctaacacaacgccggattggatgggagcagccaattttgaaacccactccatgaattggcccggtgcctcaggacctgggctcttctttggtggcatagggcctgcgtgaaatgtcttccagcccatgttttttcggctaagaaggcgaactgctctagacacattgcgaatccctaatgcacggcttttaacctctagctgtggcagttcggaaagatgttggcctaggttgtaaacgccgtcgatgactaacaaacggtcgatttgaagcatacctggataacgatgaattatgagttccaattcatcgagcccaagtgctatctcatcttatcctaagggagacgtctattaatgcttcatcacataggtaaatgtaatagccaatcatgttggtagcaaagaggcaaggcgatacagggagcggattgacttacctcgccaactctgatgaaccctgctatatgtaaccttgaaggttattagcagcagtatggtggtcggtcttccaacctagataatatgattgatgacaaaaatcttgtacaatactatgtaggctgtagcgacaagaagggattgactatagaattatggaccaatgctaattataaggcataaaacagcgaacaacactttgcatttcttcgtaatccagctgcctacatggattccctgtaccattctagtattcctaagatctaaaggtgttcgaaaaagtgttctgttgatattcccgtatgtcgcttctatgcaattaggtactggaaggaagtgcgtgggatgcggaaggagtacgacagcgaagttcaagaaattactgtttcaggccgttgatgctggccatggccaatgattcaccttctcatcattgctggtggatggtcagcggcccgtctagtggactgacttagcgcattctgccacgagccgagagcaccgagacagctaccccggc

SEQ ID NO: 39788 - DNA, 1341 bp, Muscodor strobelii
  misc_feature: SGI cDNA ID NO. 573856
  misc_feature: Reduced expression when VOC is produced
  misc_feature: Encodes the peptide sequence at SEQ ID NO 39789
atgccagtggaacgttatgagtccgagcccatcgatgtctcgcccttaggcgagcccttgaagttcgaattctctggccgagtagctaagaaccgcttcttcaaggctgcaatggctgaggatatggcctcgtggcaccctacaaagctggaagagcgtggtattcccacacctggcctgattgaactgtacaagagatggggtgaaggcgaatggggcatcatcacgacggggaatacggatattgagttcgacatgctagacgctgtgggtgatatgatcataacacccgagtgcccgcctagcggcccacgttttgaagcgtttcagcaactcgctacagcagccaaagcacatggaagtttgattctggcacaagttactcatcctggcaggcagctttttgcccgcattcgaaaggataccttttcagcatctgcaatttccctaggcgataattatgcagtgcctcgtgaagctacagagacagatatcgcacgtgccatagacggcttttcgcacgctgccgagtacctgcagaaggcgggtttcgatggaatcgagttgcacggcgctcacggatatctgattgcacagttcctaagcgagttgacgaaccagcggacggacaaatatggtggtagccttgcaaaccgcatgcgctttgtgctggaaattgcggaagcgattaagaggcgtacgaagcctggcttcgtattgggaatcaagattaattcagttgaatttcaagagaaaggcatcaaaccagaagaggcgagagtactcgcggaagctctgcaagaagccggctttgacttcgttgaactatccggggggaatcatgcggacattggattcggcggggagcgggagtcaagccgcaagcgcgaggcctactttgtcgagttcgtgaaagatattgtacccaatgtcacgcgtacacgtaagttccttgtcggcggtttccgaacagccagttcgatggtgaaggcccttgaggagcagccactggacggcatctctatcggccgcccagctgcgcaagagccaagactgccgaaggaaatgctctcggggaaagtcacgggaacaatcaagcctgggtttgaagctgtgaaaaacctctggttcggcctttcggtttccggctcacacatggagaagattggcaagggaagagagccatgggatgcaagcgacgagaagaatatggcggcctttcaagcagcgtgggtcgctatgggtgcagaggtcgcaaaggatggggataagctggaggtgagaggtgcgccggaggtgacgcgtgaaatgactgccaatccatatggtgtggcatattga

SEQ ID NO: 39789 - protein, 446 aa, Muscodor strobelii
  misc_feature: SGI Peptide ID NO. 573856
  misc_feature (15)..(363): Pfam Id: PF00724 Pfam Desc: NADH:flavin oxidoreductase / NADH oxidase family
  misc_feature (107)..(345): Pfam Id: PF00724 Pfam Desc: NADH:flavin oxidoreductase / NADH oxidase family
  misc_feature (5)..(445): NCBI GI: 154294266 Blast Desc: BC1G_13819 [Botryotinia fuckeliana B05.10] gi|150844829|gb|EDN20022.1| BC1G_13819 [Botryotinia fuckeliana B05.10]
  misc_feature (5)..(435): NCBI GI: 255939350 Blast Desc: Pc16g00190 [Penicillium chrysogenum Wisconsin 54-1255] gi|211585067|emb|CAP92689.1| Pc16g00190 [Penicillium chrysogenum Wisconsin 54-1255]
  misc_feature (1)..(424): NCBI GI: 169626359 Blast Desc: SNOG_16466 [Phaeosphaeria nodorum SN15] gi|111055044|gb|EAT76164.1| SNOG_16466 [Phaeosphaeria nodorum SN15]
  misc_feature (1)..(424): NCBI GI: 189195914 Blast Desc: NADH oxidase [Pyrenophora tritici-repentis Pt-1C-BFP] gi|187980174|gb|EDU46800.1| NADH oxidase [Pyrenophora tritici-repentis Pt-1C-BFP]
  misc_feature (5)..(429): NCBI GI: 169786431 Blast Desc: [Aspergillus oryzae RIB40] gi|83776424|dbj|BAE66543.1| protein product [Aspergillus oryzae]
  misc_feature (5)..(443): NCBI GI: 156066097 Blast Desc: SS1G_01060 [Sclerotinia sclerotiorum 1980] gi|154691918|gb|EDN91656.1| SS1G_01060 [Sclerotinia sclerotiorum 1980]
  misc_feature (5)..(429): NCBI GI: 238507441 Blast Desc: NADH oxidase [Aspergillus flavus NRRL3357] gi|220689635|gb|EED45986.1| NADH oxidase [Aspergillus flavus NRRL3357]
  misc_feature (1)..(429): NCBI GI: 121701545 Blast Desc: NADH oxidase [Aspergillus clavatus NRRL 1] gi|119397180|gb|EAW07611.1| NADH oxidase [Aspergillus clavatus NRRL 1]
  misc_feature (5)..(446): NCBI GI: 70995668 Blast Desc: NADH oxidase [Aspergillus fumigatus Af293] gi|19309402|emb|CAD27301.1| NADH oxidase [Aspergillus fumigatus] gi|41581299|emb|CAE47948.1| NADH oxidase, [Aspergillus fumigatus]
  misc_feature (5)..(407): NCBI GI: 119495510 Blast Desc: NADH oxidase [Neosartorya fischeri NRRL 181] gi|119412700|gb|EAW22641.1| NADH oxidase [Neosartorya fischeri NRRL 181]
  misc_feature (30)..(350): SWISSPROT Homolog: EC 1.6.99.1 NADPH dehydrogenase
  misc_feature: Useful for introducing or modulating the production of volatile compounds
MPVERYESEPIDVSPLGEPLKFEFSGRVAKNRFFKAAMAEDMASWHPTKLEERGIPTPGLIELYKRWGEGEWGIITTGNTDIEFDMLDAVGDMIITPECPPSGPRFEAFQQLATAAKAHGSLILAQVTHPGRQLFARIRKDTFSASAISLGDNYAVPREATETDIARAIDGFSHAAEYLQKAGFDGIELHGAHGYLIAQFLSELTNQRTDKYGGSLANRMRFVLEIAEAIKRRTKPGFVLGIKINSVEFQEKGIKPEEARVLAEALQEAGFDFVELSGGNHADIGFGGERESSRKREAYFVEFVKDIVPNVTRTRKFLVGGFRTASSMVKALEEQPLDGISIGRPAAQEPRLPKEMLSGKVTGTIKPGFEAVKNLWFGLSVSGSHMEKIGKGREPWDASDEKNMAAFQAAWVAMGAEVAKDGDKLEVRGAPEVTREMTANPYGVAY

SEQ ID NO: 39790 - DNA, 2132 bp, Muscodor strobelii
  misc_feature: SGI EST ID NO. CUFF.96271.1
  misc_feature: Variant of the nucleotide sequence at SEQ ID NO 39788
ggactagcaacggatttaaggggttgacccatgaaacgcattagtacatgccttcgacaagtttcttgggatatcggccgactagttcgtcattaacacaatagtcatcttgggatgaagagtatatataagaggaatagaagatgtctcattcatttgatatgcttctgaaaatcagtaataacctatagcgcaagacaaaaatatatcaagcttttagaaccatcagctactatcaccttttatcccctaaataccagcgcttcttgagaacaatatgccagtggaacgttatgagtccgagcccatcgatgtctcgcccttaggcgagcccttgaagttcgaattctctggccgagtagctaagaaccgcttcttcaaggctgcaatggctgaggatatggcctcgtggcaccctacaaagctggaagagcgtggtattcccacacctggcctgattgaactgtacaagaggtatttgtcacagttattacttgcatggcttgtgacattcttattcaagcacccaaagctgacgaccgaatggtagatggggtgaaggcgaatggggcatcatcacgacggggaatacggatattgagttcgacatgctagacgctgtgggtgatatgatcataacacccgagtgcccgcctagcggcccacgttttgaagcgtttcagcaactcgctacagcagccaaagcacatggaagtttgattctggcacaagttactcatcctggcaggcagctttttgcccgcattcgaaaggataccttttcagcatctgcaatttccctaggtgagctcggtttggaaatcccaaggcccagctgaatcagttttctttcgctcaaaatagtgggtggaatacaggctaacaatcacgcaaaataaacaggcgataattatgcagtgcctcgtgaagctacagagacagatatcgcacgtgccatagacggcttttcgcacgctgccgagtacctgcagaaggcgggtttcgatggaatcgagttgcacggcgctcacggatatctgattgcacagttcctaagcgagttgacgaaccagcggacggacaaatatggtggtagccttgcaaaccgcatgcgctttgtgctggaaattgcggaagcgattaagaggcgtacgaagcctggcttcgtattgggaatcaagattaattcagttgaatttcaagagaaaggcatcaaaccagaagaggcgagagtactcgcggaagctctgcaagaagccggctttgacttcgttgaactatccggggggaatcatgcggacattggattcggcggggagcgggagtcaagccgcaagcgcgaggcctactttgtcgagttcgtgaaagatattgtacccaatgtcacgcgtacacgtaagttccttgtcggcggtttccgaacagccagttcgatggtgaaggcccttgaggagcagccactggacggcatctctatcggccgcccagctgcgcaagagccaagactgccgaaggaaatgctctcggggaaagtcacgggaacaatcaagcctgggtttgaagctgtgaaaaacctctggttcggcctttcggtttccggctcacacatggagaagattggcaagggaagagagccatgggatgcaagcgacgagaagaatatggcggcctttcaagcagcgtgggtcgctatgggtgcagaggtcgcaaaggatggggataagctggaggtgagaggtgcgccggaggtgacgcgtgaaatgactgccaatccatatggtgtggcatattgagctccgtggtcgtgaaggcagcagcaaagttatattattagacttggtgatccgcaagcgtcagcacgatcacatagatttcatgcattaggtagataaaccagaaatggttgagctagatgctcatagattcagacgataagagaaaagaacacatcgacgccagttagtatcgttctaaatctggcataccagcttgtgtcttatgcaatgcatgtaggattcaatccatcattgatattgttggtacgttattttgctcttcagtgctaatgccatctcgcacgccatccatattatgaacttgacatcagattgaacactatgcgagtatctatt

SEQ ID NO: 39791 - DNA, 1863 bp, Muscodor strobelii
  misc_feature: SGI cDNA ID NO. 573857
  misc_feature: Encodes the peptide sequence at SEQ ID NO 39792
atggtcgataatagtcacgactggtccaacgaagatggccgccaggctttgagccgccagagcctcgaggattcgaggcaatcgttcgaggatgccggaccagcagatagtcttttgaacgagaacgagcgagccgctaacatcatcgctttccagcccggcgttccggaaatcggaaccgggaccgcagttggtgatacccgcgatcctcggacttggcgtccgaacaaggcggcggaaacgaagaaaccggtctcatggaaggatctgcccaagaaagaccaacttcttgtcatcttgcttgcacgcctaagtgagcctctgactcaaacctccctacagtcttatatgttctatcagctgcaatggtttgatccaagtctccctgattctactatatcaagtcaggctggaattttgcatgctagtttcacggcagcgcagtttctgaccgcaatgatctggggtcgggtatcagattcgaaatattctggccgcaagactgttatcatgataggtctctttggcactctgatatcctgcgttggctttggcttctcgacgagcttctaccaagctctaatctttcgatctcttggcggcattaccaatggtaacataggtgttatgaggacgatgatcagtgagactattcgggaaaagaagtaccagtcccgtgcattcctcatactaccaatgacattcaacatcggtgtcatcgttggacctatattgggcggcctgttgtctgatcccgcgggatcttatccagatcttttcggcggtgtggacttctttaaaagatttccctatgcatcgcctaatattgtcagcgctttgttcctacttctttcgctgaccatgtgctggctgctgctagaagagaccctcgatagtcgcaaagacaggcgcgatatcggtattctcctcggtcgtcgattgaaaagcctatgtagaagacgcgtcgatcgaattgcctacacaccgcttcattcccgtggcacgagcctgaacagcactatcagcacgactgatctcgagttgtctcccacggctgctcgagatgcagacgaacttgtgcctacgaaggccggcagcggcaagcgctacatcagccggctccctttcaagcgaatattcactcgcaatgtgaccttcactctcatatcgcatttctttctggccttccacgtcgggaccttcaattcgctctggtttgttttcctttcgacacccgtctacgatccttcgaaatcaaggccgccagacttggagccccgtctcccctttcgtttcacaggaggcttaggcctgccgccgcggtccgtcgggttggcaatggctgtgttgggggcaatcggaattctcatgcaactcttcctatatccgcgcttatctgctcgcctcggcacatcgcgttccctgcgtacgttcttgttctgctttccggtaacctacgtattcttaccctatctatccgtcgtaccaagtacaacgccgccgccaagtcagaagacgggtgtcctgatctggatcgccgtgacagcagtgttgttgggtcaagtcaccggccggacattcgctctccccgccacgaccatattgatcaacaattgtacgccgcacccgagtgttctaggaactgtccatggtattggtcagagcacttcatcattcgctaggacagtgggacctattctaggggggttcgtgtatggccaaggcttgagtcatggtgtcgtcggcagcgtgttttgggggttagctggcgtcgccgcagtcggggtgtttttcagtttctggctccgggaaggtgatgggcatgagatatggttagagggagatgaagaagacgaagcttga

SEQ ID NO: 39792 - protein, 620 aa, Muscodor strobelii
  misc_feature: SGI Peptide ID NO. 573857
  misc_feature (99)..(565): Pfam Id: PF07690 Pfam Desc: Major Facilitator Superfamily
  misc_feature (134)..(565): Pfam Id: PF07690 Pfam Desc: Major Facilitator Superfamily
  misc_feature (75)..(618): NCBI GI: 256732145 Blast Desc: NECHADRAFT_41158 [Nectria haematococca mpVI 77-13-4]
  misc_feature (66)..(619): NCBI GI: 154302583 Blast Desc: BC1G_09868 [Botryotinia fuckeliana B05.10] gi|150855357|gb|EDN30549.1| BC1G_09868 [Botryotinia fuckeliana B05.10]
  misc_feature (66)..(615): NCBI GI: 156055416 Blast Desc: SS1G_05060 [Sclerotinia sclerotiorum 1980] gi|154702844|gb|EDO02583.1| SS1G_05060 [Sclerotinia sclerotiorum 1980]
  misc_feature (117)..(616): NCBI GI: 171678027 Blast Desc: protein product [Podospora anserina] gi|170937082|emb|CAP61741.1| protein product [Podospora anserina]
  misc_feature (79)..(615): NCBI GI: 169618341 Blast Desc: SNOG_12362 [Phaeosphaeria nodorum SN15] gi|160703598|gb|EAT80175.2| SNOG_12362 [Phaeosphaeria nodorum SN15]
  misc_feature (64)..(612): NCBI GI: 154291752 Blast Desc: BC1G_15035 [Botryotinia fuckeliana B05.10] gi|150846614|gb|EDN21807.1| BC1G_15035 [Botryotinia fuckeliana B05.10]
  misc_feature (68)..(618): NCBI GI: 115492113 Blast Desc: conserved [Aspergillus terreus NIH2624] gi|114197544|gb|EAU39244.1| conserved [Aspergillus terreus NIH2624]
  misc_feature (84)..(618): NCBI GI: 67516885 Blast Desc: AN0724.2 [Aspergillus nidulans FGSC A4] gi|40746045|gb|EAA65201.1| AN0724.2 [Aspergillus nidulans FGSC A4]
  misc_feature (84)..(618): NCBI GI: 259489000 Blast Desc: TPA: MFS transporter, (AFU_orthologue; AFUA_1G13970) [Aspergillus nidulans FGSC A4]
  misc_feature (74)..(614): NCBI GI: 156034519 Blast Desc: SS1G_13194 [Sclerotinia sclerotiorum 1980] gi|154698598|gb|EDN98336.1| SS1G_13194 [Sclerotinia sclerotiorum 1980]
MVDNSHDWSNEDGRQALSRQSLEDSRQSFEDAGPADSLLNENERAANIIAFQPGVPEIGTGTAVGDTRDPRTWRPNKAAETKKPVSWKDLPKKDQLLVILLARLSEPLTQTSLQSYMFYQLQWFDPSLPDSTISSQAGILHASFTAAQFLTAMIWGRVSDSKYSGRKTVIMIGLFGTLISCVGFGFSTSFYQALIFRSLGGITNGNIGVMRTMISETIREKKYQSRAFLILPMTFNIGVIVGPILGGLLSDPAGSYPDLFGGVDFFKRFPYASPNIVSALFLLLSLTMCWLLLEETLDSRKDRRDIGILLGRRLKSLCRRRVDRIAYTPLHSRGTSLNSTISTTDLELSPTAARDADELVPTKAGSGKRYISRLPFKRIFTRNVTFTLISHFFLAFHVGTFNSLWFVFLSTPVYDPSKSRPPDLEPRLPFRFTGGLGLPPRSVGLAMAVLGAIGILMQLFLYPRLSARLGTSRSLRTFLFCFPVTYVFLPYLSVVPSTTPPPSQKTGVLIWIAVTAVLLGQVTGRTFALPATTILINNCTPHPSVLGTVHGIGQSTSSFARTVGPILGGFVYGQGLSHGVVGSVFWGLAGVAAVGVFFSFWLREGDGHEIWLEGDEEDEA

SEQ ID NO: 39793 - DNA, 3986 bp, Muscodor strobelii
  misc_feature: SGI EST ID NO. CUFF.96289.0
  misc_feature: Variant of the nucleotide sequence at SEQ ID NO 39791
ctattatctgatcgggttcttttgtaataggcaaagtttactccagagttgccccttcaacaactgcattgtcctttacggtgtttcacaccacgtgtatacatacaatatcgacccctcattgaaccaaacccccaccgacagcaaatggtcgataatagtcacgactggtccaacgaagatggccgccaggctttgagccgccagagcctcgaggattcgaggcaatcgttcgaggatgccggaccagcagatagtcttttgaacgagaacgagcgagccgctaacatcatcgctttccagcccggcgttccggaaatcggaaccgggaccgcagttggtgatacccgcgatcctcggacttggcgtccgaacaaggcggcggaaacgaagaaaccggtctcatggaaggatctgcccaagaaagaccaacttcttgtcatcttgcttgcacgcctaagtgagcctctgactcaaacctccctacagtcttatatgttctatcagctgcaatggtttgatccaagtctccctgattctactatatcaagtcaggctggaattttgcatgctagtttcacggcagcgcagtttctgaccgcaatgatctggggtcgggtatcagattcgaaatattctggccgcaagactgttatcatgataggtctctttggcactctgatatcctgcgttggctttggcttctcgacgagcttctaccaagctctaatctttcgatctcttggcggcattaccaatggtaacataggtgttatgaggacgattgagactattcgggaaaagaagtaccagtcccgtgcattcctcatactaccaatgacattcaacatcggtgtcatcgttggacctatattgggcggcctgttgtctgatcccgcgggatcttatccagatcttttcggcggtgtggacttctttaaaagatttccctatgcatcgcctaatattgtcagcgctttgttcctacttctttcgctgaccatgtgctggctgctgctagaagagaccctcgatagtcgcaaagacaggcgcgatatcggtattctcctcggtcgtcgattgaaaagcctatgtagaagacgcgtcgatcgaattgcctacacaccgcttcattcccgtggcacgagcctgaacagcactatcagcacgactgatctcgagttgtctcccacggctgctcgagatgcagacgaacttgtgcctacgaaggccggcagcggcaagcgctacatcagccggctccctttcaagcgaatattcactcgcaatgtgaccttcactctcatatcgcatttctttctggccttccacgtcgggaccttcaattcgctctggtttgttttcctttcgacacccgtctacgatccttcgaaatcaaggccgccagacttggagccccgtctcccctttcgtttcacaggaggcttaggcctgccgccgcggtccgtcgggttggcaatggctgtgttgggggcaatcggaattctcatgcaactcttcctatatccgcgcttatctgctcgcctcggcacatcgcgttccctgcgtacgttcttgttctgctttccggtaacctacgtattcttaccctatctatccgtcgtaccaagtacaacgccgccgccaagtcagaagacgggtgtcctgatctggatcgccgtgacagcagtgttgttgggtcaagtcaccggccggacattcgctctccccgccacgaccatattgatcaacaattgtacgccgcacccgagtgttctaggaactgtccatggtattggtcagagcacttcatcattcgctaggacagtgggacctattctaggggggttcgtgtatggccaaggcttgagtcatggtgtcgtcggcagcgtgttttgggggttagctggcgtcgccgcagtcggggtgtttttcagtttctggctccgggaaggtgatgggcatgagatatggttagagggagatgaagaagacgaagcttgatataccacacataaacggtattctagcctctgctgcaaactatatcagacgaaacacttgctatcttgtgttctcaaattcccagctcaatgtattccatagaacgtagatcagctcgtcttccagcgtcacgataatcgtgaaacttgacgacagtgagtttacacattaaagatatttgcgttatgagttagttacttgaagctgtcgaaataagatctcaataatttggatacatcacaagtcacgggtaacgtagctacacccaccgatccaagacgccatcgcaagattgacgccagcggcggactgaggtgtggacggtgtctagttacacaaatgatgagatggaatgatgaggtggcccctcagatgaaccaaatctctcgattctcaattatacacgagcatcagttctcgatgggccatgatacggttgccgctgtgacgcgtgatgcgctgttcgtcgaagcattaggtaaggttaaacgacagatgcccaaaaactcactcaagcgatgagagatgcatgaagcaacggatcttgtaccacctgctggaatcatattttacatgcagcgattctatatctcgcgtgatctcaggaatatgactgtgacgtgcgcgatccgtttcggccgcgctaacccatgccaccgtgctatcctccatgacgctcatgatcctcaatctatctcaacgtcaatttccaggtctagagatgcaataatgtcatcggcaaccagaggcctgtggatctggggaatgcccttcttgtccttgccgttctggtgattctgcaactgcagcttttgcagatgaggaagaagcgctgttttggtggtcgggccgatcttgggtgtgctgccagccggtgtcgaggctccgctgccgttgctcgacttgttcttcgcctccgcagattcgttcgcactatgcgtgaggacgggcttggtcttgagccttcgcgatgtgtcttcctccacctcctcacctctcgcaaggcgcgcttcgaatgttgcggactctggctctctccatcagctgtgccttgcggacagcttcgacgttgtcgcgccgtctctgggcattgacctgagccaagcggtcctgctgtgacagggcggcggagctaggcttcttgttgggcaccaggctcgtcctaaaagccaatttaggcacctccatcttatccagctggctctggagttcggcggcccgcgcgtcgtcgccccggtctttagcctcctctagcttgttaagcagacggttgcgctccgacgagtcgtacttcttcttcatctcgctcatgcgggtcagcttgtcgttgacttctttctcagtccatgtgcggttccggagagcgttgatgtcgtcgatcttggcatctacttggggccgtttggggaaaggcacattgtcgtcctggcatgctcgctggtaccgataggcttccgactgtgtgcgtgtgagcataaccatgacagaacggcctggatgcggaatgcttacctcggtgaaagacgagtcggagcaggaaatgaaggggaactcgcggactagcttgccatgagccaccttaacatactgatctgtgacgaagctctggccgttcatcttctgcatagcatacggcttgccggttgtgaagcctggtggtgtcagcaaagagagaagggatgccgagcactaatggagggtgcacacctttgatcacacacatgtggtactcgggctcgccagtgtcacggttggggccgaccgccacgcgcgcgtagcagcccgcgatggcctcctcaaagcccgggtagaaacagacctcggcaaagcgactgcggctgagccggacgcgctcgaagtcgcgcagctcggcgggcggcgcatccttcttctcgggcgttggcgagcgggagggtctgcggcggtaggtgtcggcccactcgacgtcgctgtcgccatcgtcgtcgtggcgggggctgtcg

SEQ ID NO: 39794 - DNA, 822 bp, Muscodor strobelii
  misc_feature: SGI cDNA ID NO. 573858
  misc_feature: Encodes the peptide sequence at SEQ ID NO 39795
atgatctcatcgctggtttcgttcattctggccaataatcctcttgcaacgagtgatggcacaaatgatgaaaccattaccccagtctcactcgtaagtatgattgactggcgagactatatttcacgagaaacaggcgcgtctcgccatggcgcactcttatcctacctgaagaatccaatggtaatcttgagagccttcgcagcttacagcgagtcacaatccctgactcgtcgcattgccttcgatccgtttattgtatatcttgacaagaatgacccagtcactacgtatgatgctggtgttctatttgagatcttctatctcgcgacacttaaagctgacaggctagatagcatagatgagggcatgaatctttgggttaaaggtgtccacagccggttcgacaaagaacaagctgacctcctctttcaggtcatgcacctaggattcaaggacttctctcaaatatggagacaaattaatgcaattgaaggctggaaaggagcattcccaactcaccctgatagattcttcagtcctgaggattctctctatgcagaatttaccttgcgatggaatgctctagcttcacctattgaccagctaccgatgaaggtcagcggcctgcctgagggtattcgtgccttatggcagtcaattgaccttgacaaaggtaactctcttcggatgaagtcattggcgagcgtgtacattgatctgcttgagaaatacgagaagacttatgctgatgctatgtcggggacaatgaaacctcccgcacaaccaacgaaagtgagaaaaggacgtcgacgcgtctag

SEQ ID NO: 39795 - protein, 273 aa, Muscodor strobelii
  misc_feature: SGI Peptide ID NO. 573858
MISSLVSFILANNPLATSDGTNDETITPVSLVSMIDWRDYISRETGASRHGALLSYLKNPMVILRAFAAYSESQSLTRRIAFDPFIVYLDKNDPVTTYDAGVLFEIFYLATLKADRLDSIDEGMNLWVKGVHSRFDKEQADLLFQVMHLGFKDFSQIWRQINAIEGWKGAFPTHPDRFFSPEDSLYAEFTLRWNALASPIDQLPMKVSGLPEGIRALWQSIDLDKGNSLRMKSLASVYIDLLEKYEKTYADAMSGTMKPPAQPTKVRKGRRRV

SEQ ID NO: 39796 - DNA, 259 bp, Muscodor strobelii
  misc_feature: SGI EST ID NO. CUFF.96117.0
  misc_feature: Variant of the nucleotide sequence at SEQ ID NO 39794
cttcgatccgtttattgtatatcttgacaagaatgacccagtcactacgtatgatgctggtgttctatttgagatcttctatctcgcgacacttaaagctgacaggctagatagcatagatgagggcatgaatctttgggttaaaggtgtccacagccggttcgacaaagaacaagctgacctcctctttcaggtcatgcacctaggattcaaggacttctctcaaatatggagacaaattaatgcaattgaaggctgg

SEQ ID NO: 39797 - DNA, 2550 bp, Muscodor strobelii
  misc_feature: SGI cDNA ID NO. 573859
  misc_feature: Elevated expression when VOC is produced
  misc_feature: Encodes the peptide sequence at SEQ ID NO 39798
atggagccccgcaaacgcgtcgttcggattgtgaaacccatcgatcagcactgggaattcaaacaggctgagaagggtgatgatacgtatctccctgttgcccaattccccacaaacatccatctagacttacttagtcattcaatcattccggaccccttcatcgggaagaatgagcttgaagtgcaatgggtcggcgaaacggcctgggtttaccggacacggtttacgaccatcgacaagagccacaaggccgtcctcgcttttgatggcctcgatacttttgcgggagtatggctgaatggcaaaaaaatcttagagaccgataacatgttcatccctgagcgtgttgaggtgacggatgttctggccagcgccggcgacgagaacgagctgctcatcaagttcgatatcgcgtactttcggggatgggagcgcgtcgaagagcacccagaccacaaatggggttgttggaacggcgatagtgctaggttggccgtacggaagtctcagtaccatttcggctgggactggggtccgactcttatcacctgtgggccttggagatcgatctatctcgagctatacgaatcccggatcactgatgtctggtgcaacgtagaggtcgacgaatcactcaagaaggccgttgtccatactcgagtgtcagtagaaggcgaagcttcgaccgtgcgactggacatctctctcggctccagtttgaagggttctgtggagttcaaaccaggagaagaaatccacatggcaatcgatgatcccgagctctggtatccgattcgatatgggaatcaaccactatatacagtgacggccactatcctggaagatggccaacccatagatagtatgagaaagcggataggactacgacgtgccaggctcgtgcaaagaagactggaagggcaacctggtacttccttcttcttcgaagtcaacaacatacctatcttttgtggaggaagtgactggatccccgcagacaactttatcccacgtataggcaaagacaggtactatgattgggtcaagcttgctgcagatggaaatcaaaatatgatacgcgtctggggcggaggtatatacgaagagcaagcattctacgatgcgtgcgacgaactcggcattcttgtctggcaagactttatgtttggatgtggcaattatcccgcgtggcctgagcttcttgattcaatcaagcgtgaagccgaagagaacgtcaaactgctacgtcatcatccttgcattgtgctctgggctggaaataatgaagactatcaattcgccgaagatgcgaaactcaaatgggaccccaagaacacggatcccgagagctggcttgagaccgaattcccagcacggtacatctatgaaaagatccttcctgatgcgtgtcgagagctctgtccgtcggtagactaccaccccggcagcccttggggtggtgttaccagtcgcgatccgacggtcggcgacattcatcaatggaacgtgtggcatggaacacaagagaagtaccaaaatttcgacaagctcataggacgattcgtatcggaatttggcatggaggcgtttccttcagtcaagactatcgatggatttctacccaaaggtaaagacgacccggatcgttatgctcagtcttcaacagtcgatttccacaataaggctgatggccacgagcgccgaatcgccttatatctagttgaaaatttccgatacgcacctgaccctttcgaacagttcgtgtactgcacgcagctaatgcaaggcgaatgcctggcatctgcgtatcgcctatggcgtcgtcaatggaaggggccgaaccgcgaatactgcggcggctccctggtgtggcaactgaatgactgctggcccgtgacgtcttggtctatttgtgactattatctacgcccgaagcatgcttactacaccgtgaagcgggagatggctccactgactgttggtataacacggcatgagcatcacgaacccccagagaacaagtactctcgtatcgataagacaatgtcgaaaatcgaggtctgggcaagcaacttcacccttgaagagataagagtggactgctctatccgtggcttcgatgtcgaaactgggaaggagctgtacgacgagacaatcactggccttactctggcagcaaaccagtcaacggagatcacaaccaggagcgttgcacgaggaaaagagcatgacgaacgtcgtaccgttgttgctgcttatctcacttcatcgtcagcgcagcttgcacgttatgtcaattggcctgagcccttgaaatacctgcacctccaacgtccccaagaccttaaaattgagctgagcgaagggactgattctgtatcacttagcgctgaggtacccatcaaggggcttgctgtggaatgtgaagacgatgtcgcgttcgaagacaaccttatcgatgttgtgcctggagagacggttcgtattggggttcaaggcgcaaagaagagcaccaagtttactggtcggtacttagggatggaataa

SEQ ID NO: 39798 - protein, 849 aa, Muscodor strobelii
  misc_feature: SGI Peptide ID NO. 573859
  misc_feature (9)..(848): NCBI GI: 85115055 Blast Desc: NCU00890 [Neurospora crassa OR74A] gi|28926600|gb|EAA35570.1| NCU00890 [Neurospora crassa OR74A]
  misc_feature (9)..(847): NCBI GI: 145614054 Blast Desc: MGG_01178 [Magnaporthe grisea 70-15] gi|145021032|gb|EDK05161.1| MGG_01178 [Magnaporthe grisea 70-15]
  misc_feature (11)..(848): NCBI GI: 154303355 Blast Desc: BC1G_09426 [Botryotinia fuckeliana B05.10] gi|150854989|gb|EDN30181.1| BC1G_09426 [Botryotinia fuckeliana B05.10]
  misc_feature (11)..(848): NCBI GI: 156054258 Blast Desc: SS1G_05977 [Sclerotinia sclerotiorum 1980] gi|154703757|gb|EDO03496.1| SS1G_05977 [Sclerotinia sclerotiorum 1980]
  misc_feature (7)..(848): NCBI GI: 261361356 Blast Desc: beta-mannosidase [Verticillium albo-atrum VaMs.102]
  misc_feature (9)..(849): NCBI GI: 46107848 Blast Desc: FG00807.1 [Gibberella zeae PH-1]
  misc_feature (10)..(848): NCBI GI: 171694832 Blast Desc: protein product [Podospora anserina] gi|170947658|emb|CAP59820.1| protein product [Podospora anserina]
  misc_feature (9)..(848): NCBI GI: 256735520 Blast Desc: NECHADRAFT_90428 [Nectria haematococca mpVI 77-13-4]
  misc_feature (9)..(847): NCBI GI: 239611445 Blast Desc: beta-mannosidase [Ajellomyces dermatitidis ER-3]
  misc_feature (11)..(847): NCBI GI: 225562545 Blast Desc: beta-mannosidase [Ajellomyces capsulatus G186AR]
  misc_feature (22)..(659): SWISSPROT Homolog: EC 3.2.1.25 Beta-mannosidase
  misc_feature: Useful for introducing or modulating the production of volatile compounds
MEPRKRVVRIVKPIDQHWEFKQAEKGDDTYLPVAQFPTNIHLDLLSHSIIPDPFIGKNELEVQWVGETAWVYRTRFTTIDKSHKAVLAFDGLDTFAGVWLNGKKILETDNMFIPERVEVTDVLASAGDENELLIKFDIAYFRGWERVEEHPDHKWGCWNGDSARLAVRKSQYHFGWDWGPTLITCGPWRSIYLELYESRITDVWCNVEVDESLKKAVVHTRVSVEGEASTVRLDISLGSSLKGSVEFKPGEEIHMAIDDPELWYPIRYGNQPLYTVTATILEDGQPIDSMRKRIGLRRARLVQRRLEGQPGTSFFFEVNNIPIFCGGSDWIPADNFIPRIGKDRYYDWVKLAADGNQNMIRVWGGGIYEEQAFYDACDELGILVWQDFMFGCGNYPAWPELLDSIKREAEENVKLLRHHPCIVLWAGNNEDYQFAEDAKLKWDPKNTDPESWLETEFPARYIYEKILPDACRELCPSVDYHPGSPWGGVTSRDPTVGDIHQWNVWHGTQEKYQNFDKLIGRFVSEFGMEAFPSVKTIDGFLPKGKDDPDRYAQSSTVDFHNKADGHERRIALYLVENFRYAPDPFEQFVYCTQLMQGECLASAYRLWRRQWKGPNREYCGGSLVWQLNDCWPVTSWSICDYYLRPKHAYYTVKREMAPLTVGITRHEHHEPPENKYSRIDKTMSKIEVWASNFTLEEIRVDCSIRGFDVETGKELYDETITGLTLAANQSTEITTRSVARGKEHDERRTVVAAYLTSSSAQLARYVNWPEPLKYLHLQRPQDLKIELSEGTDSVSLSAEVPIKGLAVECEDDVAFEDNLIDVVPGETVRIGVQGAKKSTKFTGRYLGME

SEQ ID NO: 39799 - DNA, 3296 bp, Muscodor strobelii
  misc_feature: SGI EST ID NO. CUFF.96121.0
  misc_feature: Variant of the nucleotide sequence at SEQ ID NO 39797
gaacttatgagacataattagcacacccggtttcgcaaagtgatagctcacgaacggtatgagtagcggtctgtttcgaggttcttgaggccccaactcgcgaccaacctcggcggtagttatgccgtctccaatcgggattgacgtagccccaaccagtcacaatcaccacttacacgcctcagcagaagctgcgaagtatataaagtaccctacttcctacctctgttgacgtggtctgctcttgactttgacgccgaatttccaaaaactaggccgagccccttctttctgccttcggtcaaaccgcttgtgtgacgttatgaccttgaactccagccggcaccagcccgttatttgacgcctaatattgtttcacgggtctacccattatctgcctactactcgaatccgaagttttcaccggttccatctttacttcaattgagtagtgaacagatcttcacgatccttgtacataccccgcgatggagccccgcaaacgcgtcgttcggattgtgaaacccatcgatcagcactgggaattcaaacaggctgagaagggtgatgatacgtatctccctgttgcccaattccccacaaacatccatctagacttacttagtcattcaatcattccggaccccttcatcgggaagaatgagcttgaagtgcaatgggtcggcgaaacggcctgggtttaccggacacggtttacgaccatcgacaagagccacaaggccgtcctcgcttttgatggcctcgatacttttgcgggagtatggctgaatggcaaaaaaatcttagagaccgataacatgttcatccctgagcgtgttgaggtgacggatgttctggccagcgccggcgacgagaacgagctgctcatcaagttcgatatcgcgtactttcggggatgggagcgcgtcgaagagcacccagaccacaaatggggttgttggaacggcgatagtgctaggttggccgtacggaagtctcagtaccatttcggctgggactggggtccgactcttatcacctgtgggccttggagatcgatctatctcgagctatacgaatcccggatcactgatgtctggtgcaacgtagaggtcgacgaatcactcaagaaggccgttgtccatactcgagtgtcagtagaaggcgaagcttcgaccgtgcgactggacatctctctcggctccagtttgaagggttctgtggagttcaaaccaggagaagaaatccacatggcaatcgatgatcccgagctctggtatccgattcgatatgggaatcaaccactatatacagtgacggccactatcctggaagatggccaacccatagatagtatgagaaagcggataggactacgacgtgccaggctcgtgcaaagaagactggaagggcaacctggtacttccttcttcttcgaagtcaacaacatacctatcttttgtggaggaagtgactggatccccgcagacaactttatcccacgtataggcaaagacaggtactatgattgggtcaagcttgctgcagatggaaatcaaaatatgatacgcgtctggggcggaggtatatacgaagagcaagcattctacgatgcgtgcgacgaactcggcattcttgtctggcaagactttatgtttggatgtggcaattatcccgcgtggcctgagcttcttgattcaatcaagcgtgaagccgaagagaacgtcaaactgctacgtcatcatccttgcattgtgctctgggctggaaataatgaagactatcaattcgccgaagatgcgaaactcaaatgggaccccaagaacacggatcccgagagctggcttgagaccgaattcccagcacggtacatctatgaaaagatccttcctgatgcgtgtcgagagctctgtccgtcggtagactaccaccccggcagcccttggggtggtgttaccagtcgcgatccgacggtcggcgacattcatcaatggaacgtgtggcatggaacacaagagaagtaccaaaatttcgacaagctcataggacgattcgtatcggaatttggcatggaggcgtttccttcagtcaagactatcgatggatttctacccaaaggtaaagacgacccggatcgttatgctcagtcttcaacagtcgatttccacaataaggctgatggccacgagcgccgaatcgccttatatctagttgaaaatttccgatacgcacctgaccctttcgaacagttcgtgtactgcacgcagctaatgcaaggcgaatgcctggcatctgcgtatcgcctatggcgtcgtcaatggaaggggccgaaccgcgaatactgcggcggctccctggtgtggcaactgaatgactgctggcccgtgacgtcttggtctatttgtgactattatctacgcccgaagcatgcttactacaccgtgaagcgggagatggctccactgactgttggtataacacggcatgagcatcacgaacccccagagaacaagtactctcgtatcgataagacaatgtcgaaaatcgaggtctgggcaagcaacttcacccttgaagagataagagtggactgctctatccgtggcttcgatgtcgaaactgggaaggagctgtacgacgagacaatcactggccttactctggcagcaaaccagtcaacggagatcacaaccaggagcgttgcacgaggaaaagagcatgacgaacgtcgtaccgttgttgctgcttatctcacttcatcgtcagcgcagcttgcacgttatgtcaattggcctgagcccttgaaatacctgcacctccaacgtccccaagaccttaaaattgagctgagcgaagggactgattctgtatcacttagcgctgaggtacccatcaaggggcttgctgtggaatgtgaagacgatgtcgcgttcgaagacaaccttatcgatgttgtgcctggagagacggttcgtattggggttcaaggcgcaaagaagagcaccaagtttactggtcggtacttagggatggaataaacagtgcaatcaaaaatgagatgaaaagccggatagattatctcccaatcctttccatgatcaaatctgactgtatctgaagttgattctgacggcgaatgcatgatagaatcctgtcaagaaaccgaaagactcttggaaccatcattgacggccttgcaactgacatctcatgctagccggaccttgatttttttagctatgttaattgttatttgtgacattttcaaacgaagaaatgttgttttgatgttggat

SEQ ID NO: 39800 - DNA, 1884 bp, Muscodor strobelii
  misc_feature: SGI cDNA ID NO. 573860
  misc_feature: Encodes the peptide sequence at SEQ ID NO 39801
atggagtcagaagacgccaatccacttgagatggtcctcaacttcactattgcggtttatgaacgagcccgtcgtcagacagggcataccccaacccttgcagcacgacaggatgtgattgacaaattcatgaccctattcacgagatcgtcggttgcttcccaggccttgaccaacatgactacgacgcaggtctcacccgcctaccatccctctgccctccccattgctgatcttgctccaatgcctctttcacgaatgagactcttcgagagacatcagggaaagaaagtcaccgttcgggtcatcacaactgctttcgaaatggatgggatcaaggctgtcgttaaggatgaggaggagagcgctgttgttctccaactctatcaccagcagaaacctcctttgattcatgctcaggatatcctccgacaaaagtcagtcatggtgctcaaggagccgtttttcatgattgatgtagacggccaatattgcgtgagagttgaccacgtcagtgacgttatctggctgcaagacaccgaccgccagatcccagagaagtggcagagtcaatatccgaaagcagtagactcagcgacaattcgtgcgcaaggaaatgctgcagttgaggagagacaatgggccaaagccgccgatctttattcacaggcgatttgtgtggctcaaacaccgaatgagaaacaacttgcttatctcaatcgttctcttgcacatcttcgcctcgggttctcagagaaggcccttgaagatgctcgcgcaggaattggagacgagcagcatatcgaaaagggatattctcgtgccgccagagctctttatgagttgggccgcttcaaagaatgcctggcaacatgggcaacatttacgaaggtgtttccaaacaatggagatgccgaaatcgaagtgcgaaaagcagcgcagcggatcaatgagcagctaactggcgagtacgagttcgcttccatgtgtcaacaagctgaactcgcaagtcctcccatcatcgattgttcgacgtaccagagaccagttgtcgtgcggcagaccgacagatgcggaatgggcctcttcactacgaaagcagttacagctggcgagcttcttctctgtgaaaaggcttttgcttactcatatgctgatagatatgacgctcttgcagctagaaacctcagagtccttatgaaaatagaagagaagacggtgacaatggacggacaagctcatctaggaacacagatcattcacaagctcaagaactgccctcagacatctgaagcgttcaagactctccaccgcggaaactatcacataggcgcggtctccgagacagacggacagcctgttgtcgacactttcttagtggagaagatccgtttgctgagtgttctcaatggtgccatcaagagtttcaaggcacagcagagcatagaacaatcgctgcatcaccagatcctgaaactgcttggccagatcaacaaaacatatccaaccagcgaagacggcattcgattagaaatcgtcgaagggtactttaccattggcaagagacttgcctcgactgatcctctggacgctattcagtatctcatcaaaggattccaggctctgggctacgacataactactacacctatgcagggatatggtgctcctaatatgcttatcagacgatggggttatgctgtttactactccgtcactgcatttgcaggtctccatactgcctacagagcaggtgcaccggcactgtgccagagaatggaggagtatgctctgacgctctacagaatttgcaccgggacagatgagggatttagaatgttcgccgccgtcggcgagcgtgtcaactatggcgaccacacataa

SEQ ID NO: 39801 - protein, 627 aa, Muscodor strobelii
  misc_feature: SGI Peptide ID NO. 573860
  misc_feature (54)..(496): NCBI GI: 256724864 Blast Desc: NECHADRAFT_34421 [Nectria haematococca mpVI 77-13-4]
  misc_feature (60)..(471): NCBI GI: 46102672 Blast Desc: FG00040.1 [Gibberella zeae PH-1]
  misc_feature (60)..(462): NCBI GI: 67541318 Blast Desc: AN6829.2 [Aspergillus nidulans FGSC A4] gi|40739038|gb|EAA58228.1| AN6829.2 [Aspergillus nidulans FGSC A4] gi|259480425|tpe|CBF71545.1| TPA: TPR domain protein nidulans
  misc_feature (23)..(500): NCBI GI: 156058151 Blast Desc: SS1G_04807 [Sclerotinia sclerotiorum 1980] gi|154702592|gb|EDO02331.1| SS1G_04807 [Sclerotinia sclerotiorum 1980]
  misc_feature (21)..(475): NCBI GI: 159126891 Blast Desc: TPR domain protein [Aspergillus fumigatus A1163]
  misc_feature (21)..(475): NCBI GI: 70997262 Blast Desc: TPR domain protein [Aspergillus fumigatus Af293] gi|66851018|gb|EAL91344.1| TPR domain protein [Aspergillus fumigatus Af293]
  misc_feature (62)..(463): NCBI GI: 46117750 Blast Desc: FG04651.1 [Gibberella zeae PH-1]
  misc_feature (19)..(475): NCBI GI: 145230690 Blast Desc: An01g12010 [Aspergillus niger] gi|134055728|emb|CAK44101.1| protein product [Aspergillus niger]
  misc_feature (35)..(467): NCBI GI: 255944463 Blast Desc: Pc20g04550 [Penicillium chrysogenum Wisconsin 54-1255] gi|211587734|emb|CAP85784.1| Pc20g04550 [Penicillium chrysogenum Wisconsin 54-1255]
  misc_feature (109)..(615): NCBI GI: 116198303 Blast Desc: CHGG_07307 [Chaetomium globosum CBS 148.51] gi|88178586|gb|EAQ86054.1| CHGG_07307 [Chaetomium globosum CBS 148.51]
MESEDANPLEMVLNFTIAVYERARRQTGHTPTLAARQDVIDKFMTLFTRSSVASQALTNMTTTQVSPAYHPSALPIADLAPMPLSRMRLFERHQGKKVTVRVITTAFEMDGIKAVVKDEEESAVVLQLYHQQKPPLIHAQDILRQKSVMVLKEPFFMIDVDGQYCVRVDHVSDVIWLQDTDRQIPEKWQSQYPKAVDSATIRAQGNAAVEERQWAKAADLYSQAICVAQTPNEKQLAYLNRSLAHLRLGFSEKALEDARAGIGDEQHIEKGYSRAARALYELGRFKECLATWATFTKVFPNNGDAEIEVRKAAQRINEQLTGEYEFASMCQQAELASPPIIDCSTYQRPVVVRQTDRCGMGLFTTKAVTAGELLLCEKAFAYSYADRYDALAARNLRVLMKIEEKTVTMDGQAHLGTQIIHKLKNCPQTSEAFKTLHRGNYHIGAVSETDGQPVVDTFLVEKIRLLSVLNGAIKSFKAQQSIEQSLHHQILKLLGQINKTYPTSEDGIRLEIVEGYFTIGKRLASTDPLDAIQYLIKGFQALGYDITTTPMQGYGAPNMLIRRWGYAVYYSVTAFAGLHTAYRAGAPALCQRMEEYALTLYRICTGTDEGFRMFAAVGERVNYGDHT

SEQ ID NO: 39802 - DNA, 1104 bp, Muscodor strobelii
  misc_feature: SGI cDNA ID NO. 573861
  misc_feature: Reduced expression when VOC is produced
  misc_feature: Encodes the peptide sequence at SEQ ID NO 39803
atgctgctggcatccagctatgccatgcctcatatcacacagctcgcgccaagagccacagactcagccctagagccgtgggtgacggttggtactgatggctctgccgtcaccgtcacgcctgtgcagacgacggtcgacggaacgccaactatcgtctctggagctccccacgacctcactgctaccgtctacactcacactagcaacctcaaggtctctaccacgaccggtgctcctcctctgccaactgctaccaacacccagggtgcgggatccttcgcggtgtgccacaatctcgaaggcgacatggcaccttggtgcgatcccactactcaagatcctctttatgttggatcaacttactactttacgtgggacgctacctacttcaacagcaccgacaacgccaccgcctccatcgtcgggaactacgtcaacgaaaccaccctcgaggcaaccgaacatgctttcgacttcgacacatacaacgccatgggctacaaggcgatccccatcaccagcgaatacctccgataccagggctcccagaacatctccctgaccctcgtcgtcctcatcaacaacaacagcaagaagatcgcccgtcccggtcccaccatccacgtcacgaaccggcccggctacaaggccgtatcgggcggcgctcgtctgccccaaggtgccgccttgtacatcgcccttcccaccgtctttggcttcatcatcctctgcactatcggcggttgctggtggaacagacaacatcgtcgtatcgaacttggaaacgtcatgtcccgtacccgcaagcctttctctggaatcggcgataagatctcacgaaccaggaaagcaaggaaggcgaatgagcgcatccagctgatggagcgtgaggtcgcggcagagggtggcgagatgtaccgcgatattcccgagcctcctcagcgtccccgccgcgacagcaacgacctggggagtctcgccggaacacccacagaggagcgccagatgaactttggtcgtcccgcggctagaggagatagccccacgactggcaatgcgttccgggacgagttgaagaggcaggataacgagaggatatag

SEQ ID NO: 39803 - protein, 367 aa, Muscodor strobelii
  misc_feature: SGI Peptide ID NO. 573861
  misc_feature (27)..(366): NCBI GI: 256735400 Blast Desc: NECHADRAFT_98915 [Nectria haematococca mpVI 77-13-4]
  misc_feature (15)..(366): NCBI GI: 46108106 Blast Desc: FG00935.1 [Gibberella zeae PH-1]
  misc_feature (20)..(320): NCBI GI: 154321001 Blast Desc: BC1G_01375 [Botryotinia fuckeliana B05.10] gi|150851913|gb|EDN27105.1| BC1G_01375 [Botryotinia fuckeliana B05.10]
  misc_feature (20)..(320): NCBI GI: 156054574 Blast Desc: SS1G_06135 [Sclerotinia sclerotiorum 1980] gi|154703915|gb|EDO03654.1| SS1G_06135 [Sclerotinia sclerotiorum 1980]
  misc_feature (1)..(319): NCBI GI: 85119691 Blast Desc: NCU02561 [Neurospora crassa OR74A] gi|28927504|gb|EAA36456.1| [Neurospora crassa OR74A] gi|38567145|emb|CAE76440.1| [Neurospora crassa]
  misc_feature (27)..(340): NCBI GI: 39943082 Blast Desc: [Magnaporthe grisea 70-15] gi|145009794|gb|EDJ94450.1| [Magnaporthe grisea 70-15]
  misc_feature (15)..(297): NCBI GI: 261354667 Blast Desc: conserved [Verticillium albo-atrum VaMs.102]
  misc_feature (75)..(296): NCBI GI: 116181506 Blast Desc: CHGG_01381 [Chaetomium globosum CBS 148.51] gi|88185678|gb|EAQ93146.1| CHGG_01381 [Chaetomium globosum CBS 148.51]
  misc_feature (75)..(305): NCBI GI: 171695910 Blast Desc: protein product [Podospora anserina] gi|170948197|emb|CAP60361.1| protein product [Podospora anserina]
  misc_feature (45)..(279): NCBI GI: 258567440 Blast Desc: [Uncinocarpus reesii 1704] gi|237905910|gb|EEP80311.1| [Uncinocarpus reesii 1704]
  misc_feature: Useful for introducing or modulating the production of volatile compounds
MLLASSYAMPHITQLAPRATDSALEPWVTVGTDGSAVTVTPVQTTVDGTPTIVSGAPHDLTATVYTHTSNLKVSTTTGAPPLPTATNTQGAGSFAVCHNLEGDMAPWCDPTTQDPLYVGSTYYFTWDATYFNSTDNATASIVGNYVNETTLEATEHAFDFDTYNAMGYKAIPITSEYLRYQGSQNISLTLVVLINNNSKKIARPGPTIHVTNRPGYKAVSGGARLPQGAALYIALPTVFGFIILCTIGGCWWNRQHRRIELGNVMSRTRKPFSGIGDKISRTRKARKANERIQLMEREVAAEGGEMYRDIPEPPQRPRRDSNDLGSLAGTPTEERQMNFGRPAARGDSPTTGNAFRDELKRQDNERI

SEQ ID NO: 39804 - DNA, 6159 bp, Muscodor strobelii
  misc_feature: SGI EST ID NO. CUFF.96267.0
  misc_feature: Variant of the nucleotide sequence at SEQ ID NO 39802
cccgcagctaccggatcccaactttcgtattgaactgtcgctcgctgatgaattgagttgtttttctcctgatgattctgtgaatcaattgcctctctttagacgtggaattgcttttattcgatcttcaacaactaaaacctcatccaaatcgactggtgatcccctttatcagtctcccgcgtggtgcatcttatactgcacccccctgcagacgagatgccgatgctttcatcagttgccgcagcgtcgatgctgctggcatccagctatgccatgcctcatatcacacagctcgcgccaagagccacagactcagccctagagccgtgggtgacggttggtactgatggctctgccgtcaccgtcacgcctgtgcagacgacggtcgacggaacgccaactatcgtctctggagctccccacgacctcactgctaccgtctacactcacactagcaacctcaaggtctctaccacgaccggtgctcctcctctgccaactgctaccaacacccagggtgcgggatccttcgcggtgtgccacaatctcgaaggcgacatggcaccttggtgcgatcccactactcaagatcctctttatgttggatcaacttactactttacgtgggacgctacctacttcaacagcaccgacaacgccaccgcctccatcgtcgggaactacgtcaacgaaaccaccctcgaggcaaccgaacatgctttcgacttcgacacatacaacgccatgggctacaaggcgatccccatcaccagcgaatacctccgataccagggctcccagaacatctccctgaccctcgtcgtcctcatcaacaacaacagcaagaagatcgcccgtcccggtcccaccatccacgtcacgaaccggcccggctacaaggccgtatcgggcggcgctcgtctgccccaaggtgccgccttgtacatcgcccttcccaccgtctttggcttcatcatcctctgcactatcggcggttgctggtggaacagacaacatcgtcgtatcgaacttggaaacgtcatgtcccgtacccgcaagcctttctctggaatcggcgataagatctcacgaaccaggaaagcaaggaaggcgaatgagcgcatccagctgatggagcgtgaggtcgcggcagagggtggcgagatgtaccgcgatattcccgagcctcctcagcgtccccgccgcgacagcaacgacctggggagtctcgccggaacacccacagaggagcgccagatgaactttggtcgtcccgcggctagaggagatagccccacgactggcaatgcgttccgggacgagttgaagaggcaggataacgagaggatatagagtttctatttcgagggtatgagactctgcaatttggctaaaggtcactgttgaagactaataaaactgggctatgtttgtacagggatgatattaatgatgtatgcttcgaatatgattgaagatgacgggggagcttgtatatattgccatcatcttggccatttagaatgggatagaggcccagcgaaataaatggcaacttcgcaaagaactaaatcatgctgtcaagatttcactcttttctaacagaagcaaataagcgagtagtttgaagctgccttctattgagaaaaccatctactactaaccccagcccaaaagacaaagggaacgagaaccgagtctctgatgtccattttccctccaagattcgttgcgttatgcattttgtcggacttcgatatccctaccgaaaaacaaaacacccggaaacccaacaccaatatccagcaacccaaactcgctcgctcgcagttcaaacttcaacttcaactttcgtttcgaaccttccgcgtccctcttctccttagatcacctccatctcttcctcaaatctcaaatctcccctccctctccccccttatccccggaacgaaaaaatcaacaaaatcaaggtttctcaaaagccccctcctcaaccacaagatcaagttcatcaaaatccctaatgaccggtcccccaaaaacatggccattctctcctcctgctttccggtcgttatcatgtcccgggacatggaccggcatatcgaagaaatcgcccgacccattgacgcccattgccagatccaggggcgtgggcggttgtgtcctcttagagtgcgatcgaggtggccactccgtgcccggatgcggactatgcacgggagataaatggttatgagaatggctggtcgctatatgaggactcgacgcggagtgtcctagggtacgattgtattgtgaggtggaggattcattccccctgctccttggcgcggcccggtgatatttcccactactagtaatattcagcgtatgcatagagctcgtcggcgtccgtacactcgatgcatcatcagaatacgcgctgacactcctgggccctccctctccccaaccctgcgacctcaagcttggcgtcaagtatccgcccgtactagtaaccgtcgcatttgacctccccccaacactagatggcggatgatgaaatctcctgcgtccaatcgcagatgaagcgatggactcgccgtccatcacgctcgcgtctatactcgcatcgctatctgcggcactgttattctgactatcgtgccatgatcgcggtgcgagccagcaatagctcatttcgtgagctgcttcaatcccaacgcttgacacgcctttccatggcggggtgcgggtgccctttaggcggggcgaaaggtggtatgagacgccgtctttgtaccgcgcgttgggagagtcgacggatacgctggcgagggtttgtaaaatgaagtataggaggacccaacgaccgcgtcgtgctgtgaagggatcgagtggggagacggagagatgatctgctttttcgaaacgtacgaatgattcgacgagagcggaggatgtgaaggccgagccgagggtgtagatgttcgttgcttcggtgtaggctaattgaaccctgcgctcgagcgtgcggtcgtctgtcactggggatttggatgcgttcttgtcctttttgtgtttcgtctcgcgacctgagggaggcgagaggggcgagggtgtgattgagtctgggactagagggtaaggatgggggatatgtgggaagcgagagcgattgtcgtattcgattaggatgtcagttagtggcaggtcggaggtgtcggcttcgaaggatttgttcccgccttgactgaccatcatccattttcgactgcttcgtgtttcgctttcgtcccatactatgtcccggtttacgaggtagtcgtatagcgcgccgaagtcgcgttgaagagcccgagcgactgtgcggcttagccagatttcttcgtcggagtttgggttgagttcgggtggccaggtcccgtagatcatagaataatgattttggaggaatgcttgtagtcgttctgctgcggccttgcctgcacttcctgggatcccgccgcttgttggccaggcatcgacgtaacagaattgggcgagcctctcttcggccgcctggacgcgtagctgggtctcaagacaggctcgctcgagaagtgcccgagtgatcggtgtcaaatgtttgaaatcggcacagttgtctaagcgaggatacatgccagcgcagtgcaggaatgcctctcgccagccttcttcccatcggacctcgggagtctccgaccatgcgagcatcgagactgcggtctcaggatcatttcgtgcatcgtcaatacctcgcgcagatagatagttcagtatcgtaccgacgttatctgcgtccggttgcatataagcatctagccgagcgagcagatcagatagagcttggtacagcgataggccgaccaatgacgcatgatataagagcgcaaagacattccgcgttgtaactgcgtgccggtgtgcttcaaacttgctcacatttgaaggagtgggaaaatacatctcgtatgaaatctggccatctgcgttcgcaagtgcattgtcttctgagacgggtggcgttgcctgccccgttcgatcaagctgtgcataggtgctatgccgtatcatgggcggtgcaccaacgggtgaaggcgggagattgatttggctgtcatagtcatcttctgtagatccttcacgcagtagagtgaccaagaaccgggattcagttgcttcgatgatgtgtgatgacaggcggaatgacggatttggtcgttgaggttggtcctttctcccgaagtatacaagaacgtctccgtttggatcccagagttcggggtctttccgtagtttgttccacttttgcaccggtcttccactccccatccatcgtttcatcggcggtgctgtagatgtggggattgcaggcagtttggaggacggaggtggaagttgctgacggtcaggatcccaagcccccggtgatggtctttgggaagtaggtaatgccggaacatcactcatataaaattcttcaggatcatatgttggccttatagtcgcggacgaaggcgcacgatcaggtagatcggcagtcttcttccttttgaggcccagtgtgaacgcctttgtaagtcccttccgaatatcatcactcttcttgtctaaattgctgcgaaagccagacctttcaatgccggagacatcttccgtcttcaagactggtttacgagctcgagcatacgcatagtcaggcatcggccctcggctctgtgaggcaccatctcttctgccctcgtcgcttccaccactctgactcccactactattgttacgaagttccgtcaaatcggggcgtgacgattcggcttcatttccctggtcagcgaacttcagaaaacgcgcattcgtagtgccataaccagtccctgctggcatcggatgatcggcgaaagaggcatcgtctgcagatatccgagagctacccgaagacttggctcgtccccgtactgtcggaggcttttcacccgtcttcggctcggtgatcttctttctcacatacgcgctacgtcccgacatcttgaatgtgcgcagtaggattcaagccacctcataagtcgtacgatgcaaatcgtgatatgcagaggtgtagcaggtatacccgaccgaacacgtgtgaagcgggtcctgccgtgctccggcttgctggtcacgatccgctcggttccgaattcgtatagctgagtgccagatctcgagctgcacaagcttgcctttctcaactgtgaatggcgagttttgttatccgggcgtcggcttcaccgttaggtcgggacgcgatggtgcaagttggtcctagaaaccggacagcgcggaactataactattggtagttgatgagctataaccattgatttcattgtatacgatgacgaatcctgtgatttatcctccccatttgcaattattcttgttcgccgatgtactgtcttgaacgacaaattgacttggtagcagttcgttttcaaatgcggccacaatcgatatatgtcctgtaaaacctaaagatcggcaatattggagatttgaccgagatcccaatgctgatgagcgagagttgtgaggacggctatctatcgagatctcagacgatactcaatcgtagaataatgatatcatctgtcacatcagggcaggaagcccaagttgcttttgtcgttgagattctcggcgcacctatgagaatgcaggtgaaatggcgtacaggaatatgcgcggtgcgtttcgtacccagccacttcgaagccatgaagctctcagcagtagcaaaatgagacaaatccttccatagctcctcggcctagtatgatgttgtcgggctaaagtgagaccaagaagagaacagaaaaatcaaaatacgcggcacgcctcaatgcattagagctgcctctcgtccttctagtgtcacgcattttacggaggcacccgtaagctgctgaatacaggcctgcatgccggatatcgaatctccacgcggacgcgcaacagtagtaacagcaaaatacatatgcgaggaggtggtgtgagcaaggcactcaattgggtcgctacgataaccgcaagatggcctggctgaactttggaacatcccagatgcctgttcaggacgtggatgggcttgtaaactgaccagggtagctgcta

SEQ ID NO: 39805 - DNA, 3066 bp, Muscodor strobelii
  misc_feature: SGI cDNA ID NO. 573862
  misc_feature: Encodes the peptide sequence at SEQ ID NO 39806
atgtcgggacgtagcgcgtatgtgagaaagaagatcaccgagccgaagacgggtgaaaagcctccgacagtacggggacgagccaagtcttcgggtagctctcggatatctgcagacgatgcctctttcgccgatcatccgatgccagcagggactggttatggcactacgaatgcgcgttttctgaagttcgctgaccagggaaatgaagccgaatcgtcacgccccgatttgacggaacttcgtaacaatagtagtgggagtcagagtggtggaagcgacgagggcagaagagatggtgcctcacagagccgagggccgatgcctgactatgcgtatgctcgagctcgtaaaccagtcttgaagacggaagatgtctccggcattgaaaggtctggctttcgcagcaatttagacaagaagagtgatgatattcggaagggacttacaaaggcgttcacactgggcctcaaaaggaagaagactgccgatctacctgatcgtgcgccttcgtccgcgactataaggccaacatatgatcctgaagaattttatatgagtgatgttccggcattacctacttcccaaagaccatcaccgggggcttgggatcctgaccgtcagcaacttccacctccgtcctccaaactgcctgcaatccccacatctacagcaccgccgatgaaacgatggatggggagtggaagaccggtgcaaaagtggaacaaactacggaaagaccccgaactctgggatccaaacggagacgttcttgtatacttcgggagaaaggaccaacctcaacgaccaaatccgtcattccgcctgtcatcacacatcatcgaagcaactgaatcccggttcttggtcactctactgcgtgaaggatctacagaagatgactatgacagccaaatcaatctcccgccttcacccgttggtgcaccgcccatgatacggcatagcacctatgcacagcttgatcgaacggggcaggcaacgccacccgtctcagaagacaatgcacttgcgaacgcagatggccagatttcatacgagatgtattttcccactccttcaaatgtgagcaagtttgaagcacaccggcacgcagttacaacgcggaatgtctttgcgctcttatatcatgcgtcattggtcggcctatcgctgtaccaagctctatctgatctgctcgctcggctagatgcttatatgcaaccggacgcagataacgtcggtacgatactgaactatctatctgcgcgaggtattgacgatgcacgaaatgatcctgagaccgcagtctcgatgctcgcatggtcggagactcccgaggtccgatgggaagaaggctggcgagaggcattcctgcactgcgctggcatgtatcctcgcttagacaactgtgccgatttcaaacatttgacaccgatcactcgggcacttctcgagcgagcctgtcttgagacccagctacgcgtccaggcggccgaagagaggctcgcccaattctgttacgtcgatgcctggccaacaagcggcgggatcccaggaagtgcaggcaaggccgcagcagaacgactacaagcattcctccaaaatcattattctatgatctacgggacctggccacccgaactcaacccaaactccgacgaagaaatctggctaagccgcacagtcgctcgggctcttcaacgcgacttcggcgcgctatacgactacctcgtaaaccgggacatagtatgggacgaaagcgaaacacgaagcagtcgaaaatggatgatggtcagtcaaggcgggaacaaatccttcgaagccgacacctccgacctgccactaactgacatcctaatcgaatacgacaatcgctctcgcttcccacatatcccccatccttaccctctagtcccagactcaatcacaccctcgcccctctcgcctccctcaggtcgcgagacgaaacacaaaaaggacaagaacgcatccaaatccccagtgacagacgaccgcacgctcgagcgcagggttcaattagcctacaccgaagcaacgaacatctacaccctcggctcggccttcacatcctccgctctcgtcgaatcattcgtacgtttcgaaaaagcagatcatctctccgtctccccactcgatcccttcacagcacgacgcggtcgttgggtcctcctatacttcattttacaaaccctcgccagcgtatccgtcgactctcccaacgcgcggtacaaagacggcgtctcataccacctttcgccccgcctaaagggcacccgcaccccgccatggaaaggcgtgtcaagcgttgggattgaagcagctcacgaaatgagctattgctggctcgcaccgcgatcatggcacgatagtcagaataacagtgccgcagatagcgatgcgagtatagacgcgagcgtgatggacggcgagtccatcgcttcatctgcgattggacgcaggagatttcatcatccgccatctagtgttggggggaggtcaaatgcgacggttactagtacgggcggatacttgacgccaagcttgaggtcgcagggttggggagagggagggcccaggagtgtcagcgcgtattctgatgatgcatcgagtgtacggacgccgacgagctctatgcatacgctgaatattactagtagtgggaaatatcaccgggccgcgccaaggagcagggggaatgaatcctccacctcacaatacaatcgtaccctaggacactccgcgtcgagtcctcatatagcgaccagccattctcataaccatttatctcccgtgcatagtccgcatccgggcacggagtggccacctcgatcgcactctaagaggacacaaccgcccacgcccctggatctggcaatgggcgtcaatgggtcgggcgatttcttcgatatgccggtccatgtcccgggacatgataacgaccggaaagcaggaggagagaatggccatgtttttgggggaccggtcattagggattttgatgaacttgatcttgtggttgaggagggggcttttgagaaaccttga

SEQ ID NO: 39806 - protein, 1021 aa, Muscodor strobelii
  misc_feature: SGI Peptide ID NO. 573862
  misc_feature (1)..(805): NCBI GI: 154321966 Blast Desc: BC1G_01130 [Botryotinia fuckeliana B05.10] gi|150850377|gb|EDN25570.1| BC1G_01130 [Botryotinia fuckeliana B05.10]
  misc_feature (1)..(795): NCBI GI: 156060979 Blast Desc: SS1G_02632 [Sclerotinia sclerotiorum 1980] gi|154700036|gb|EDN99774.1| SS1G_02632 [Sclerotinia sclerotiorum 1980]
  misc_feature (1)..(381): NCBI GI: 171679367 Blast Desc: protein product [Podospora anserina] gi|170939309|emb|CAP64537.1| protein product [Podospora anserina]
  misc_feature (463)..(800): NCBI GI: 256724712 Blast Desc: NECHADRAFT_63321 [Nectria haematococca mpVI 77-13-4]
  misc_feature (413)..(770): NCBI GI: 169596120 Blast Desc: SNOG_00812 [Phaeosphaeria nodorum SN15] gi|160701233|gb|EAT92307.2| SNOG_00812 [Phaeosphaeria nodorum SN15]
  misc_feature (1)..(473): NCBI GI: 256724711 Blast Desc: NECHADRAFT_71588 [Nectria haematococca mpVI 77-13-4]
  misc_feature (463)..(810): NCBI GI: 46126217 Blast Desc: FG07486.1 [Gibberella zeae PH-1]
  misc_feature (1)..(416): NCBI GI: 46126219 Blast Desc: FG07487.1 [Gibberella zeae PH-1]
  misc_feature (597)..(810): NCBI GI: 261358553 Blast Desc: conserved [Verticillium albo-atrum VaMs.102]
  misc_feature (228)..(770): NCBI GI: 156051078 Blast Desc: SS1G_06946 [Sclerotinia sclerotiorum 1980] gi|154704724|gb|EDO04463.1| SS1G_06946 [Sclerotinia sclerotiorum 1980]
MSGRSAYVRKKITEPKTGEKPPTVRGRAKSSGSSRISADDASFADHPMPAGTGYGTTNARFLKFADQGNEAESSRPDLTELRNNSSGSQSGGSDEGRRDGASQSRGPMPDYAYARARKPVLKTEDVSGIERSGFRSNLDKKSDDIRKGLTKAFTLGLKRKKTADLPDRAPSSATIRPTYDPEEFYMSDVPALPTSQRPSPGAWDPDRQQLPPPSSKLPAIPTSTAPPMKRWMGSGRPVQKWNKLRKDPELWDPNGDVLVYFGRKDQPQRPNPSFRLSSHIIEATESRFLVTLLREGSTEDDYDSQINLPPSPVGAPPMIRHSTYAQLDRTGQATPPVSEDNALANADGQISYEMYFPTPSNVSKFEAHRHAVTTRNVFALLYHASLVGLSLYQALSDLLARLDAYMQPDADNVGTILNYLSARGIDDARNDPETAVSMLAWSETPEVRWEEGWREAFLHCAGMYPRLDNCADFKHLTPITRALLERACLETQLRVQAAEERLAQFCYVDAWPTSGGIPGSAGKAAAERLQAFLQNHYSMIYGTWPPELNPNSDEEIWLSRTVARALQRDFGALYDYLVNRDIVWDESETRSSRKWMMVSQGGNKSFEADTSDLPLTDILIEYDNRSRFPHIPHPYPLVPDSITPSPLSPPSGRETKHKKDKNASKSPVTDDRTLERRVQLAYTEATNIYTLGSAFTSSALVESFVRFEKADHLSVSPLDPFTARRGRWVLLYFILQTLASVSVDSPNARYKDGVSYHLSPRLKGTRTPPWKGVSSVGIEAAHEMSYCWLAPRSWHDSQNNSAADSDASIDASVMDGESIASSAIGRRRFHHPPSSVGGRSNATVTSTGGYLTPSLRSQGWGEGGPRSVSAYSDDASSVRTPTSSMHTLNITSSGKYHRAAPRSRGNESSTSQYNRTLGHSASSPHIATSHSHNHLSPVHSPHPGTEWPPRSHSKRTQPPTPLDLAMGVNGSGDFFDMPVHVPGHDNDRKAGGENGHVFGGPVIRDFDELDLVVEEGAFEKP

SEQ ID NO: 39807 - DNA, 1074 bp, Muscodor strobelii
  misc_feature: SGI cDNA ID NO. 573863
  misc_feature: Encodes the peptide sequence at SEQ ID NO 39808
atgaacaggttgtgcaagcgaatcaaatcagactttgctcagaatggtagcgtcttaaatcttagtcacgcttggagtgcttataactcagatgtcgtggttggctattgtcttgaagaatcgtatgacttcatcatgaaccctgattttcgtgcaccgttttcagaagccatatataatctcacagatgccatccatttcgtcactcaatttacattgatgatgaaagcagtcagactagtccctaaagcctggatcgctagactttcacctccaatggctacgatccatgctttcaacgaacagatgaaggcacaaattatacatgcgaaatcaacctacagatctggtgacaaagatccagaggcacagcaatctgtgtttgccgcactgcttgagtctgacttgcctccccgtgaactcaagactgaacggattcagcatgaagcacaagctgtcatcggcgcaggtattgagacaaccacgtacgcgctttcggtcggttcgtttcatgtcttgagtaatatgaatatccttaaaaaactcacatcggagcttgagaaggcaattcctgactccgaaaatattcccgagctagatattctaatgcaactaccatatctcacctgcgtgatcaatgagactctacgtctctcgtatggagccacacaacggatgcatcgtctttctccgacaccaatcatgtactccagttatcatctaccagtgggcacagttcttagtatggacaactatacagcttcacacgatacatgggcattcccatctccaaacgaatttcgacccgagcgttgggaggataatgctcgcgcgccggatggtaaacctctcaccgcgtacatggttgcgtttagtcacgggactagaagttgccttggtatgcaattggcttatgcttcgatatatatcggacttgcaactttcattcggagatttgattgtgaactttttgagacagggcgggatgccgtcgagtgtttttatgatagatttgtgcccagggcagaaccgggaacgaaaggcgtaagggtgacaattgcagggatgcactaa

SEQ ID NO: 39808 - protein, 357 aa, Muscodor strobelii
  misc_feature: SGI Peptide ID NO. 573863
  misc_feature (1)..(349): Pfam Id: PF00067 Pfam Desc: Cytochrome P450
  misc_feature (153)..(320): Pfam Id: PF00067 Pfam Desc: Cytochrome P450
  misc_feature (1)..(353): NCBI GI: 238507347 Blast Desc: cytochrome P450, [Aspergillus flavus NRRL3357] gi|220689588|gb|EED45939.1| cytochrome P450, [Aspergillus flavus NRRL3357]
  misc_feature (1)..(353): NCBI GI: 169786345 Blast Desc: [Aspergillus oryzae RIB40] gi|83776381|dbj|BAE66500.1| protein product [Aspergillus oryzae]
  misc_feature (1)..(353): NCBI GI: 145248191 Blast Desc: An13g02060 [Aspergillus niger] gi|134081093|emb|CAK41605.1| protein product [Aspergillus niger]
  misc_feature (1)..(355): NCBI GI: 259483598 Blast Desc: TPA: cytochrome P450, (Eurofung) [Aspergillus nidulans FGSC A4]
  misc_feature (1)..(353): NCBI GI: 259484233 Blast Desc: TPA: cytochrome P450, (Eurofung) [Aspergillus nidulans FGSC A4]
  misc_feature (1)..(353): NCBI GI: 67902644 Blast Desc: AN8309.2 [Aspergillus nidulans FGSC A4] gi|40747776|gb|EAA66932.1| AN8309.2 [Aspergillus nidulans FGSC A4]
  misc_feature (1)..(353): NCBI GI: 212539279 Blast Desc: benzoate 4-monooxygenase cytochrome P450, [Penicillium marneffei ATCC 18224] gi|210069537|gb|EEA23628.1| benzoate 4-monooxygenase cytochrome P450, [Penicillium marneffei ATCC
  misc_feature (10)..(353): NCBI GI: 119172571 Blast Desc: CIMG_09899 [Coccidioides immitis RS]
  misc_feature (10)..(353): NCBI GI: 240111650 Blast Desc: Cytochrome P450 family protein [Coccidioides posadasii C735 delta SOWgp]
  misc_feature (1)..(353): NCBI GI: 242795016 Blast Desc: cytochrome P450, [Talaromyces stipitatus ATCC 10500] gi|218719081|gb|EED18501.1| cytochrome P450, [Talaromyces stipitatus ATCC 10500]
  misc_feature (13)..(319): SWISSPROT Homolog: EC 1.14.14.1 Unspecific monooxygenase
MNRLCKRIKSDFAQNGSVLNLSHAWSAYNSDVVVGYCLEESYDFIMNPDFRAPFSEAIYNLTDAIHFVTQFTLMMKAVRLVPKAWIARLSPPMATIHAFNEQMKAQIIHAKSTYRSGDKDPEAQQSVFAALLESDLPPRELKTERIQHEAQAVIGAGIETTTYALSVGSFHVLSNMNILKKLTSELEKAIPDSENIPELDILMQLPYLTCVINETLRLSYGATQRMHRLSPTPIMYSSYHLPVGTVLSMDNYTASHDTWAFPSPNEFRPERWEDNARAPDGKPLTAYMVAFSHGTRSCLGMQLAYASIYIGLATFIRRFDCELFETGRDAVECFYDRFVPRAEPGTKGVRVTIAGMH

SEQ ID NO: 39809 - DNA, 1524 bp, Muscodor strobelii
  misc_feature: SGI cDNA ID NO. 573864
  misc_feature: Encodes the peptide sequence at SEQ ID NO 39810
atgagatggcccgaccgaaacgtcatcccgttgctgtcagtgcggctccagcctgctacgcgtcgcgtcgttcagcggaaacgcccgcggtcagaggaacaactcgatatcacatcaaacaaacggccaaagggcaatcgagcccaacccgatcaaaaggttcggaatctcaaaacaaggaatcgcaaatcttatatatctccttcagcggtagtcaatgaagtccctcaaaaggtgttcacgattctggtttttggtactagtgagaatggagagctcggccttggtccaacagggactggagaagtcttacggcccgtactaaacccatttctcaaccccagtaacccagaatcatatcgcattgttgacttcgcctgcggtgggatgcataccgttgcattgagtgccgacaacaagatcatcacgtggggaataaacgataacaatgcgcttgggagaaagacagactggagtggtggtctacgtgatgttgacgctgattcggctgaggaagacggggaattaaatcctcatgaatcaacccctacggaaattccagcgaaccatttcccatctggtactcggttttgtcaggttgctgctgggaactgcagtagctttgcgcttactgacgatgggctggtctacggctggggcacattccgtagcttgcaaggccaagaacgtttcgggtatgatacaaatgggaagatgatacaaaggcaagaaacgcctgttcaaatccaaggtctccccaaaatcacgcagatcgtgtgcggatcagctcatgccctggctttagataccgcaggaaacatctgggcctggggctacaacgaacataatcaatttgggcggcgtttctttgggcgacggcatcaagattcctttgtgcctagccaggttcgaatatgtcgtaacagggctaagtatattgcttctggaaatcatcattcattcgctgtcgatcgggacgataatgtgtgggcatggggggccaacagttttgggcaagcaggaaatcccgacacagctggcaacgacttcgcaactttgctcttcccggtaaagattcgagaactgtgccaaagacgcgtcacagctatggccgcgggcgctcatcattcagttgcgatcgctgctgatggccaatgctatgcatggggaagaacagatattggcgcgcttggcgtcgcattcaccccggaacaaatccacgatacaaaccacatacgatgcgacgatcgtggcagacctcgcaattgcttgcgtccgactgctgtccctaatatcacagtggcgcacatcgcctgtggaacggatcacacaattttcattgacaggtcgggatccgcctactcgtctggttttggtgatcaaggtcagcttggattgaattccactgacgatgttgaggttgcaactcttataagcagtaaatcggttaagagcagatgtctcagtcgggctggagctgcaggaaactattcgattgtagctggtgccgatcagggtgattag

SEQ ID NO: 39810 - protein, 507 aa, Muscodor strobelii
  misc_feature: SGI Peptide ID NO. 573864
  misc_feature (213)..(268): Pfam Id: PF00415 Pfam Desc: Regulator of chromosome condensation (RCC1)
  misc_feature (18)..(501): NCBI GI: 261354290 Blast Desc: regulator of chromosome condensation [Verticillium albo-atrum VaMs.102]
  misc_feature (26)..(499): NCBI GI: 238840331 Blast Desc: RNA transport protein 2 [Microsporum canis CBS 113480]
  misc_feature (23)..(502): NCBI GI: 240110146 Blast Desc: Regulator of chromosome condensation family protein [Coccidioides posadasii C735 delta SOWgp]
  misc_feature (23)..(502): NCBI GI: 119179563 Blast Desc: CIMG_08516 [Coccidioides immitis RS]
  misc_feature (68)..(502): NCBI GI: 258577767 Blast Desc: conserved [Uncinocarpus reesii 1704] gi|237903331|gb|EEP77732.1| conserved [Uncinocarpus reesii 1704]
  misc_feature (30)..(501): NCBI GI: 121714259 Blast Desc: Ran exchange factor Prp20/Pim1, [Aspergillus clavatus NRRL 1] gi|119402894|gb|EAW13314.1| Ran exchange factor Prp20/Pim1, [Aspergillus clavatus NRRL 1]
  misc_feature (10)..(499): NCBI GI: 115388879 Blast Desc: conserved [Aspergillus terreus NIH2624] gi|114196029|gb|EAU37729.1| conserved [Aspergillus terreus NIH2624]
  misc_feature (55)..(499): NCBI GI: 145248596 Blast Desc: An14g00080 [Aspergillus niger] gi|134081304|emb|CAK41807.1| protein product [Aspergillus niger]
  misc_feature (15)..(499): NCBI GI: 255935947 Blast Desc: Pc13g05660 [Penicillium chrysogenum Wisconsin 54-1255] gi|211583620|emb|CAP91635.1| Pc13g05660 [Penicillium chrysogenum Wisconsin 54-1255]
  misc_feature (72)..(502): NCBI GI: 256722489 Blast Desc: NECHADRAFT_35093 [Nectria haematococca mpVI 77-13-4]
  misc_feature (120)..(361): SWISSPROT Homolog: EC 2.7.11.1 Non-specific serine/threonine protein kinase
MRWPDRNVIPLLSVRLQPATRRVVQRKRPRSEEQLDITSNKRPKGNRAQPDQKVRNLKTRNRKSYISPSAVVNEVPQKVFTILVFGTSENGELGLGPTGTGEVLRPVLNPFLNPSNPESYRIVDFACGGMHTVALSADNKIITWGINDNNALGRKTDWSGGLRDVDADSAEEDGELNPHESTPTEIPANHFPSGTRFCQVAAGNCSSFALTDDGLVYGWGTFRSLQGQERFGYDTNGKMIQRQETPVQIQGLPKITQIVCGSAHALALDTAGNIWAWGYNEHNQFGRRFFGRRHQDSFVPSQVRICRNRAKYIASGNHHSFAVDRDDNVWAWGANSFGQAGNPDTAGNDFATLLFPVKIRELCQRRVTAMAAGAHHSVAIAADGQCYAWGRTDIGALGVAFTPEQIHDTNHIRCDDRGRPRNCLRPTAVPNITVAHIACGTDHTIFIDRSGSAYSSGFGDQGQLGLNSTDDVEVATLISSKSVKSRCLSRAGAAGNYSIVAGADQGD

SEQ ID NO: 39811 - DNA, 1754 bp, Muscodor strobelii
  misc_feature: SGI EST ID NO. CUFF.96169.0
  misc_feature: Variant of the nucleotide sequence at SEQ ID NO 39809
agacaacattagtgctgcaagccagatctcagtcacgcacgtactaaatgagatggcccgaccgaaacgtcatcccgttgctgtcagtgcggctccagcctgctacgcgtcgcgtcgttcagcggaaacgcccgcggtcagaggaacaactcgatatcacatcaaacaaacggccaaagggcaatcgagcccaacccgatcaaaaggttcggaatctcaaaacaaggaatcgcaaatcttatatatctccttcagcggtagtcaatgaagtccctcaaaaggtgttcacgattctggtttttggtactagtgagaatggagagctcggccttggtccaacagggactggagaagtcttacggcccgtactaaacccatttctcaaccccagtaacccagaatcatatcgcattgttgacttcgcctgcggtgggatgcataccgttgcattgagtgccgacaacaagatcatcacgtggggaataaacgataacaatgcgcttgggagaaagacagactggagtggtggtctacgtgatgttgacgctgattcggctgaggaagacggggaattaaatcctcatgaatcaacccctacggaaattccagcgaaccatttcccatctggtactcggttttgtcaggttgctgctgggaactgcagtagctttgcgcttactgacgatgggctggtctacggctggggcacattccgtagcttgcaaggccaagaacgtttcgggtatgatacaaatgggaagatgatacaaaggcaagaaacgcctgttcaaatccaaggtctccccaaaatcacgcagatcgtgtgcggatcagctcatgccctggctttagataccgcaggaaacatctgggcctggggctacaacgaacataatcaatttgggcggcgtttctttgggcgacggcatcaagattcctttgtgcctagccaggttcgaatatgtcgtaacagggctaagtatattgcttctggaaatcatcattcattcgctgtcgatcgggacgataatgtgtgggcatggggggccaacagttttgggcaagcaggaaatcccgacacagctggcaacgacttcgcaactttgctcttcccggtaaagattcgagaactgtgccaaagacgcgtcacagctatggccgcgggcgctcatcattcagttgcgatcgctgctgatggccaatgctatgcatggggaagaacagatattggcgcgcttggcgtcgcattcaccccggaacaaatccacgatacaaaccacatacgatgcgacgatcgtggcagacctcgcaattgcttgcgtccgactgctgtccctaatatcacagtggcgcacatcgcctgtggaacggatcacacaattttcattgacaggtcgggatccgcctactcgtctggttttggtgatcaaggtcagcttggattgaattccactgacgatgttgaggttgcaactcttataagcagtaaatcggttaagagcagatgtctcagtcgggctggagctgcaggaaactattcgattgtagctggtgccgatcagggtgattagattagggatcgaaaggatagcacgtactagggtaatggtcgattattcgtcgcagtaatcatgaagatagccatcgcggtagtcgacatcatagctattattctagataattcaattgtcgctgctgtagtggttgcaatattcattttaccgggttaccggaagagcgtcatctgatttccc

SEQ ID NO: 39812 - DNA, 1272 bp, Muscodor strobelii
  misc_feature: SGI cDNA ID NO. 573865
  misc_feature: Encodes the peptide sequence at SEQ ID NO 39813
atgctgcgctgctctaatgggttgaagtttaccaaacatggaattccatatcaaatctctacgatcgatcgagggcttgtggtcattatttcaaaggaacaaatgaaaaccctgtctaagttgccagaagatagactagacgttttcggcacacttcaaaatcagatacaggcgaagtatactgtgaacgatcagcgcgtcatccaggatccatatcaccgatatctcattcccagtcagctaactcgagatctcaatggtcacatgagccaaatgttcgcagaagtcgagaatgggttcagctccgcatggggtgtatctccagactgggaagatgtgtcggtctggcaagcattctctcatgttgtcgcccgagtgggaaatgtggtcatttgcggaccttcattgtgcagtgacgaaaagtatattgccctgctggaggctcattcagcagcattgttcagtggcgcgactatcgtcagtgccacgccgaagctattcagaccggcgagagatgcgctccagctgattatcgacgagaccgtgtcccgaaaacagaactcgcagttgtcaggggagcttattgcggagagactactcatgacgagcgtcgtgtctttgcaaggcacggcatttactctttacaatctcttattgagcctcgttgcttccgatccgtcgttgaagtatatcgaaaccttgcgcgacgagtgcgagaaagcacttagtgacactggcggcatctggactttcgaagtcgtccgcgatctgcggcttctagactctgctattcgagagtctatgagacttgcgcctttcgcctctattgggattgcgcgaacggtgacagatccaagtggaatcttgatcacgcatggggatcataatgttcgcgtgccatatggtactgttctggcgctgccaatggaaagtatccatcatgacgaagatgtataccagaatgccggtcaattcaacccatttcgcttcgtgaagaccgagaaacgacacgagaacgggtcaaaaactcccatctatacaacgatcaagcctacaacaacgccagatgagaatttcttcgggtttgggacgagtaagcatccatgtcctgggcgattcctggcggtgcatgaaatcaagttcataattggttacctgctaatgaactatgacattcaatacacaaatgcgaaatacaagccaacagacttgctcggatttaaagtgcctaacatgaacgccaaaattcgagtgcgacgacggttaggttga

SEQ ID NO: 39813 - protein, 423 aa, Muscodor strobelii
  misc_feature: SGI Peptide ID NO. 573865
  misc_feature (2)..(418): Pfam Id: PF00067 Pfam Desc: Cytochrome P450
  misc_feature (256)..(418): Pfam Id: PF00067 Pfam Desc: Cytochrome P450
  misc_feature (9)..(421): NCBI GI: 189194013 Blast Desc: ent-kaurene oxidase [Pyrenophora tritici-repentis Pt-1C-BFP] gi|187978909|gb|EDU45535.1| ent-kaurene oxidase [Pyrenophora tritici-repentis Pt-1C-BFP]
  misc_feature (4)..(410): NCBI GI: 116203897 Blast Desc: CHGG_09832 [Chaetomium globosum CBS 148.51] gi|88175960|gb|EAQ83428.1| CHGG_09832 [Chaetomium globosum CBS 148.51]
  misc_feature (28)..(421): NCBI GI: 242811722 Blast Desc: cytochrome P450, [Talaromyces stipitatus ATCC 10500] gi|218714147|gb|EED13570.1| cytochrome P450, [Talaromyces stipitatus ATCC 10500]
  misc_feature (55)..(421): NCBI GI: 212544180 Blast Desc: cytochrome P450, [Penicillium marneffei ATCC 18224] gi|210065213|gb|EEA19307.1| cytochrome P450, [Penicillium marneffei ATCC 18224]
  misc_feature (22)..(420): NCBI GI: 46139535 Blast Desc: FG11282.1 [Gibberella zeae PH-1]
  misc_feature (9)..(423): NCBI GI: 116202391 Blast Desc: CHGG_09080 [Chaetomium globosum CBS 148.51] gi|88177598|gb|EAQ85066.1| CHGG_09080 [Chaetomium globosum CBS 148.51]
  misc_feature (9)..(421): NCBI GI: 39974563 Blast Desc: MGG_00572 [Magnaporthe grisea 70-15] gi|145018527|gb|EDK02806.1| MGG_00572 [Magnaporthe grisea 70-15]
  misc_feature (28)..(423): NCBI GI: 121711948 Blast Desc: cytochrome P450 [Aspergillus clavatus NRRL 1] gi|119401741|gb|EAW12163.1| cytochrome P450 [Aspergillus clavatus NRRL 1]
  misc_feature (9)..(421): NCBI GI: 171682280 Blast Desc: protein product [Podospora anserina] gi|170941099|emb|CAP66749.1| protein product [Podospora anserina]
  misc_feature (9)..(282): NCBI GI: 258564282 Blast Desc: [Uncinocarpus reesii 1704] gi|237908393|gb|EEP82794.1| [Uncinocarpus reesii 1704]
  misc_feature (27)..(421): SWISSPROT Homolog: EC 1.14.13.78 Ent-kaurene oxidase
MLRCSNGLKFTKHGIPYQISTIDRGLVVIISKEQMKTLSKLPEDRLDVFGTLQNQIQAKYTVNDQRVIQDPYHRYLIPSQLTRDLNGHMSQMFAEVENGFSSAWGVSPDWEDVSVWQAFSHVVARVGNVVICGPSLCSDEKYIALLEAHSAALFSGATIVSATPKLFRPARDALQLIIDETVSRKQNSQLSGELIAERLLMTSVVSLQGTAFTLYNLLLSLVASDPSLKYIETLRDECEKALSDTGGIWTFEVVRDLRLLDSAIRESMRLAPFASIGIARTVTDPSGILITHGDHNVRVPYGTVLALPMESIHHDEDVYQNAGQFNPFRFVKTEKRHENGSKTPIYTTIKPTTTPDENFFGFGTSKHPCPGRFLAVHEIKFIIGYLLMNYDIQYTNAKYKPTDLLGFKVPNMNAKIRVRRRLG

SEQ ID NO: 39814 - DNA, 1740 bp, Muscodor strobelii
  misc_feature: SGI cDNA ID NO. 573866
  misc_feature: Encodes the peptide sequence at SEQ ID NO 39815
atgcggctgcttcggatcagtaatctcgacaaaattgaactagaagagtttaatgagggttctgtcccaccatacgcgattctatcccacacctggggtgcagaagaaatctcgtttcaagatcttcaaaatccaggtcgccggcgatggactcaatcattatcgcagacagcgtcagcaatcaaggagaaaaaaggttaccataagctgcgaggcgcgtctgcattagcggcccgaaatggatacgactacatctggattgacacttgttgcatcgacaagaccagcagtgctgaattgtccgaagcaataaactccatgtttcgatggtatcgagaagcgtcaatctgctatgcattcttggaagatgtcgagttcttcacgttccctaacgacgtgtggcttgatcacttttacgtattgtgccatgatagtcgatggttcacccgaggatggactttgcaagagctcattgctccacctgacgtctggttcttttcaaaggactggcagcgtgttggatgcaaagcttcggatcacaatgtacgtcaatcgcttgctgatattacaggcatcgatcttcatgttctagaaggtgcagtttcaccgagcgagataagcattgcgtctcgcatgaaatgggtgtcacagcggcagacgacgcgtgttgaagacatagcatattgtctcatgggaccttttgatgtcaatatgcccctgctctacggagagggccgaaaggcgtttgtccgattgcaagaagagattctgaagacctccaacgaccaatccatcttcatgtggtctgacttgcggcccgatcactttagtgaggaatattttgtgatggagaagaccaggtctgactcaggtcaagacatatgtggtctccttgctcaaactccctaccatttcgccagtgtacaggattactttccgatgccaccttcaatagcaagaagtagcagtacatggaacacaacaaaccaaggcttgcaggtggctctatatatgttgccatcgttggatgccattggcgatcccatccaagatgagtgcgatgcgattctggaattatcgcagcgccgggacgatgaagtctattacagaagcccatccattcggatgcggcgtttatatggagaccaatttgcccgtgtaagtcctcaggttattcagagcgtgagaactccttcatttcccgacaattcataccaggtcatattcgttaagcagaatccggtatatcccctgccgcagataatggtatccccagagcatatcgcgggcatttcgtcggtaatccctcgttctcctgttcgcctcgtcggagtatggccaggcagctcttggaaggcaaatgccgccattttcacaaccaagccttctccggcgtcgaaagtcgtaggcttgttcaggttctcggtatctgcattggaaatcgaggtagacttggcgatcggtctaaagaggagtccgcgtggtcagttggagatttggcacctacagcgttgctccgttggaaagttggcacaaaacgtaggatatgtgaatgggcacttggctcaaagcctggagagaggagaacagccagatatcttgggaggcgacgaatggacaaagacatcgttcgacccacgattgaatatcagcatggagaaagctatgttccacggaagggtgtatcatcttatcaaggctgatcttgctgtagattcagttaccagcctcatcagatga

SEQ ID NO: 39815 - protein, 579 aa, Muscodor strobelii
  misc_feature: SGI Peptide ID NO. 573866
  misc_feature (25)..(156): Pfam Id: PF06985 Pfam Desc: Heterokaryon incompatibility protein (HET)
  misc_feature (25)..(121): Pfam Id: PF06985 Pfam Desc: Heterokaryon incompatibility protein (HET)
  misc_feature (144)..(156): Pfam Id: PF06985 Pfam Desc: Heterokaryon incompatibility protein (HET)
  misc_feature (1)..(453): NCBI GI: 171683732 Blast Desc: protein product [Podospora anserina] gi|170941826|emb|CAP67479.1| protein product [Podospora anserina]
  misc_feature (16)..(495): NCBI GI: 145602171 Blast Desc: MGG_12935 [Magnaporthe grisea 70-15] gi|145010601|gb|EDJ95257.1| MGG_12935 [Magnaporthe grisea 70-15]
  misc_feature (1)..(339): NCBI GI: 115397489 Blast Desc: conserved [Aspergillus terreus NIH2624] gi|114192527|gb|EAU34227.1| conserved [Aspergillus terreus NIH2624]
  misc_feature (4)..(340): NCBI GI: 261201308 Blast Desc: HET domain-containing protein [Ajellomyces dermatitidis SLH14081] gi|239592113|gb|EEQ74694.1| HET domain-containing protein [Ajellomyces dermatitidis SLH14081]
  misc_feature (4)..(336): NCBI GI: 169770123 Blast Desc: [Aspergillus oryzae RIB40] gi|83767390|dbj|BAE57529.1| protein product [Aspergillus oryzae]
  misc_feature (4)..(340): NCBI GI: 239611724 Blast Desc: HET domain-containing protein [Ajellomyces dermatitidis ER-3]
  misc_feature (1)..(386): NCBI GI: 238493477 Blast Desc: conserved [Aspergillus flavus NRRL3357] gi|220696469|gb|EED52811.1| conserved [Aspergillus flavus NRRL3357]
  misc_feature (4)..(353): NCBI GI: 169780438 Blast Desc: [Aspergillus oryzae RIB40] gi|83773423|dbj|BAE63550.1| protein product [Aspergillus oryzae]
  misc_feature (8)..(336): NCBI GI: 169776259 Blast Desc: [Aspergillus oryzae RIB40] gi|83771331|dbj|BAE61463.1| protein product [Aspergillus oryzae]
  misc_feature (4)..(504): NCBI GI: 121715886 Blast Desc: HET domain protein [Aspergillus clavatus NRRL 1] gi|119403709|gb|EAW14126.1| HET domain protein [Aspergillus clavatus NRRL 1]
MRLLRISNLDKIELEEFNEGSVPPYAILSHTWGAEEISFQDLQNPGRRRWTQSLSQTASAIKEKKGYHKLRGASALAARNGYDYIWIDTCCIDKTSSAELSEAINSMFRWYREASICYAFLEDVEFFTFPNDVWLDHFYVLCHDSRWFTRGWTLQELIAPPDVWFFSKDWQRVGCKASDHNVRQSLADITGIDLHVLEGAVSPSEISIASRMKWVSQRQTTRVEDIAYCLMGPFDVNMPLLYGEGRKAFVRLQEEILKTSNDQSIFMWSDLRPDHFSEEYFVMEKTRSDSGQDICGLLAQTPYHFASVQDYFPMPPSIARSSSTWNTTNQGLQVALYMLPSLDAIGDPIQDECDAILELSQRRDDEVYYRSPSIRMRRLYGDQFARVSPQVIQSVRTPSFPDNSYQVIFVKQNPVYPLPQIMVSPEHIAGISSVIPRSPVRLVGVWPGSSWKANAAIFTTKPSPASKVVGLFRFSVSALEIEVDLAIGLKRSPRGQLEIWHLQRCSVGKLAQNVGYVNGHLAQSLERGEQPDILGGDEWTKTSFDPRLNISMEKAMFHGRVYHLIKADLAVDSVTSLIR

SEQ ID NO: 39816 - DNA, 1527 bp, Muscodor strobelii
  misc_feature: SGI cDNA ID NO. 573867
  misc_feature: Encodes the peptide sequence at SEQ ID NO 39817
atgtcgttccccgacggtattccgatgagcctcttcgcaaagactgctcttgctgcactatttatttacagcgtaacgctggtcttgtaccgactatatctttcacctctttcaagaataccggggcccagattggccgctttgacttactggtacgaattctactacgatggatatctcggaggccgctacttgttcaagatcaaggagctgcatgagaaatacggcccaattgttcgagtcaatcctaatcatgttcacatcaatgatatcgagttctacgacacgatctatgcacctggtgggacgaaacatcctaggaacaagattcgatggctagcaacggatcaggatagcatgtttgacacatttgacgcgtcgcttcatcgaaagagacgtgcggcggtcgcttctccgttctcgaagcaatcgatccgtttccttgatcccactattcgcaacatcatcgagcgcgtttctatgcggcttgacaagatagccgggacgggatccgtaattgagatgcacacgttgtggaacaatctaacacaagaggtcattggccagtactgcttcgggacaagcaacatgagcgatttgcgagaaggacgtgaagaggcccagtttatgctaccaaccgatgtgatcccgagaatacacgcttggggtcggcaattcccttggctatttgacttcttggagaagcttccatcgagcgtccttagtttgcttgatagtaggctcgctgatgcagagaaatttgacaaacagatcagcgcacacatcgtaaaggtcctggaagcagatcaaccgcaagttggtgcgaagaatgtgtttcacgaaatgcgagatggcaaacacttgcctccggaagacaagcgctttgcctactacaagaacgaggccgcaagcttcatgggtgccggcactggggcgttgacgactcttacttatcacttgatcgcgaacccggacctgcttcgaaatttgcgcgaggaacttaagacagtcacgtcagataacctaagcgagctgcccgtaacgcctaccctggaagcattgccgtaccttacgggtgtgataatggaggggattagattatcattctcagtgccggcgcgactaccacgtatcgcgcctacggaagaactcgtctacctcggctacaagttgccacctggaaccgtattaagccagtcggcttatctactacacacagatccgaccgtattcccagagcccttcgctttcaggcctgagagatggatgaacgatgacaacggtgccgcacgtcggcagtttgttgcattttctcgaggcgctcgcgggtgtatcggaatcaatttggcatacgcagagctgtatcaagtcgttgcgtcgatcttttcacgatttgacttccagctcttcgagacgaccgagcacgatatcaccttggaatcagagggttttattggatatagacctgcagactcaaaaggcatacgggtgcaagtgttgaggagagttaccgaacgcacttgttaa

SEQ ID NO: 39817 - protein, 508 aa, Muscodor strobelii
  misc_feature: SGI Peptide ID NO. 573867
  misc_feature (41)..(499): Pfam Id: PF00067 Pfam Desc: Cytochrome P450
  misc_feature (318)..(484): Pfam Id: PF00067 Pfam Desc: Cytochrome P450
  misc_feature (16)..(508): NCBI GI: 242815597 Blast Desc: benzoate 4-monooxygenase cytochrome P450, [Talaromyces stipitatus ATCC 10500] gi|218714939|gb|EED14362.1| benzoate 4-monooxygenase cytochrome P450, [Talaromyces stipitatus ATCC
  misc_feature (15)..(499): NCBI GI: 212527464 Blast Desc: cytochrome P450, [Penicillium marneffei ATCC 18224] gi|210073287|gb|EEA27374.1| cytochrome P450, [Penicillium marneffei ATCC 18224]
  misc_feature (16)..(502): NCBI GI: 171688250 Blast Desc: protein product [Podospora anserina] gi|170944087|emb|CAP70197.1| protein product [Podospora anserina]
  misc_feature (7)..(502): NCBI GI: 119178512 Blast Desc: CIMG_08088 [Coccidioides immitis RS]
  misc_feature (12)..(499): NCBI GI: 145234316 Blast Desc: An02g13980 [Aspergillus niger] gi|134057475|emb|CAK48829.1| protein product [Aspergillus niger]
  misc_feature (19)..(500): NCBI GI: 169776211 Blast Desc: [Aspergillus oryzae RIB40] gi|83771307|dbj|BAE61439.1| protein product [Aspergillus oryzae]
  misc_feature (17)..(504): NCBI GI: 121713434 Blast Desc: benzoate 4-monooxygenase cytochrome P450 [Aspergillus clavatus NRRL 1] gi|119402481|gb|EAW12902.1| benzoate 4-monooxygenase cytochrome P450 [Aspergillus clavatus NRRL 1]
  misc_feature (8)..(500): NCBI GI: 145248191 Blast Desc: An13g02060 [Aspergillus niger] gi|134081093|emb|CAK41605.1| protein product [Aspergillus niger]
  misc_feature (7)..(502): NCBI GI: 240104883 Blast Desc: Cytochrome P450 family protein [Coccidioides posadasii C735 delta SOWgp]
  misc_feature (22)..(504): NCBI GI: 238838499 Blast Desc: benzoate 4-monooxygenase cytochrome P450 [Microsporum canis CBS 113480]
  misc_feature (37)..(502): SWISSPROT Homolog: EC 1.14.13.12 Benzoate 4-monooxygenase
MSFPDGIPMSLFAKTALAALFIYSVTLVLYRLYLSPLSRIPGPRLAALTYWYEFYYDGYLGGRYLFKIKELHEKYGPIVRVNPNHVHINDIEFYDTIYAPGGTKHPRNKIRWLATDQDSMFDTFDASLHRKRRAAVASPFSKQSIRFLDPTIRNIIERVSMRLDKIAGTGSVIEMHTLWNNLTQEVIGQYCFGTSNMSDLREGREEAQFMLPTDVIPRIHAWGRQFPWLFDFLEKLPSSVLSLLDSRLADAEKFDKQISAHIVKVLEADQPQVGAKNVFHEMRDGKHLPPEDKRFAYYKNEAASFMGAGTGALTTLTYHLIANPDLLRNLREELKTVTSDNLSELPVTPTLEALPYLTGVIMEGIRLSFSVPARLPRIAPTEELVYLGYKLPPGTVLSQSAYLLHTDPTVFPEPFAFRPERWMNDDNGAARRQFVAFSRGARGCIGINLAYAELYQVVASIFSRFDFQLFETTEHDITLESEGFIGYRPADSKGIRVQVLRRVTERTC

SEQ ID NO: 39818 - DNA, 4699 bp, Muscodor strobelii
  misc_feature: SGI EST ID NO. CUFF.96184.0
  misc_feature: Variant of the nucleotide sequence at SEQ ID NO 39816
caagtctacgacgatgtgctagatgcggcgctaagagagaggtcgagtctacagctaaaaattcctatttgaaaatgtcgttccccgacggtattccgatgagcctcttcgcaaagactgctcttgctgcactatttatttacagcgtaacgctggtcttgtaccgactatatctttcacctctttcaagaataccggggcccagattggccgctttgacttactggtacgaattctactacgatggatatctcggaggccgctacttgttcaagatcaaggagctgcatgagaaatacggcccaattgttcgagtcaatcctaatcatgttcacatcaatgatatcgagttctacgacacgatctatgcacctggtgggacgaaacatcctaggaacaagattcgatggctagcaacggatcaggatagcatgtttgacacatttgacgcgtcgcttcatcgaaagagacgtgcggcggtcgcttctccgttctcgaagcaatcgatccgtttccttgatcccactattcgcaacatcatcgagcgcgtttctatgcggcttgacaagatagccgggacgggatccgtaattgagatgcacacgttgtggaacaatctaacacaagaggtcattggccagtactgcttcgggacaagcaacatgagcgatttgcgagaaggacgtgaagaggcccagtttatgctaccaaccgatgtgatcccgagaatacacgcttggggtcggcaattcccttggctatttgacttcttggagaagcttccatcgagcgtccttagtttgcttgatagtaggctcgctgatgcagagaaatttgacaaacagatcagcgcacacatcgtaaaggtcctggaagcagatcaaccgcaagttggtgcgaagaatgtgtttcacgaaatgcgagatggcaaacacttgcctccggaagacaagcgctttgcctactacaagaacgaggccgcaagcttcatgggtgccggcactggtaagtctctatagtaccacggccacctccgatcgctcaagttaagagctaactaatcgtgacagtaagcaacttttctctgtacaaagcgcctttgatataacccccaagtgagctattacgggtagtcaactgtcaacatgaccacaaccgaccattactgtcttcagtaacgtaacgatgcattgagccagttctacttcatagcttcagtaccccatcgcgaagttcaagactgactatatctctgtgcttaggagaccactgcaggggcgttgacgactcttacttatcacttgatcgcgaacccggacctgcttcgaaatttgcgcgaggaacttaagacagtcacgtcagataacctaagcgagctgcccgtaacgcctaccctggaagcattgccgtaccttacgggtgtgataatggaggggattagattatcattctcagtgccggcgcgactaccacgtatcgcgcctacggaagaactcgtctacctcggctacaagttgccacctggaaccgtattaagccagtcggcttatctactacacacagatccgaccgtattcccagagcccttcgctttcaggcctgagagatggatgaacgatgacaacggtgccgcacgtcggcagtttgttgcattttctcgaggcgctcgcgggtgtatcggaatcaatttggcatacgcagagctgtatcaagtcgttgcgtcgatcttttcacgatttgacttccagctcttcgagacgaccgagcacgatatcaccttggaatcagagggttttattggatatagacctgcagactcaaaaggcatacgggtgcaagtgttgaggagagttaccgaacgcacttgttaaatacctcaaatgaacagcttcgtatgcgatgtttctgcgatgaactggttcttagatcatttcggtgcgcagtcatttgttgctaggagatggacattacccgtaatcttgtgggatgttaggtacactgtgtagtgatatgcattttactatctttacagcgccctgagatcactttcaactctaataactattcttatacctagaaaacatttgtctaaaagggttggatttcaaactttcaaatgtcggactggcgatctttgattgggagtcattataggtgactggtttgttagtgataaacccgccggtgctcgcgatattcaccgggtgctgcttggttgcactaaattggtatcgatcgcggggctgctggcggtaggtaaggcggtgaaaatcatgttcagaggcactcgccagcgtaagccctgagaaatcttccaccgccggtagttcgaacacgcctgcttcatcgcgctgcaagcgtcggacaagatcgccaactgtattatggcaggcaacaatctcaatcttctcggtcgatctctcttgttcggaataatgtgaccttagaatgatgtggtgagtgcacgtccatttcatatcggctccagcgtctcgcaaaatctcgaacgatctcagatgtccgtttgcagcagccaaatgaactagtcgaaacgacatatcatctgatgaggctggtaactgaatctacagcaagatcagccttgataagatgatacacccttccgtggaacatagctttctccatgctgatattcaatcgtgggtcgaacgatgtctttgtccattcgtcgcctcccaagatatctggctgttctcctctctccaggctttgagccaagtgcccattcacatatcctacgttttgtgccaactttccaacggagcaacgctgtaggtgccaaatctccaactgaccacgcggactcctctttagaccgatcgccaagtctacctcgatttccaatgcagataccgagaacctgaacaagcctacgactttcgacgccggagaaggcttggttgtgaaaatggcggcatttgccttccaagagctgcctggccatactccgacgaggcgaacaggagaacgagggattaccgacgaaatgcccgcgatatgctctggggataccattatctgcggcaggggatataccggattctgcttaacgaatatgacctggtatgaattgtcgggaaatgaaggagttctcacgctctgaataacctgaggacttacacgggcaaattggtctccatataaacgccgcatccgaatggatgggcttctgtaatagacttcatcgtcccggcgctgcgataattccagaatcgcatcgcactcatcttggatgggatcgccaatggcatccaacgatggcaacatatatagagccacctgcaagccttggtttgttgtgttccatgtactgctacttcttgctattgaaggtggcatcggaaagtaatcctgtacactggcgaaatggtagggagtttgagcaaggagaccacatatgtcttgacctgagtcagacctggtcttctccatcacaaaatattcctcactaaagtgatcgggccgcaagtcagaccacatgaagatggattggtcgttggaggtcttcagaatctcttcttgcaatcggacaaacgcctttcggccctctccgtagagcaggggcatattgacatcaaaaggtcccatgagacaatatgctatgtcttcaacacgcgtcgtctgccgctgtgacacccatttcatgcgagacgcaatgcttatctcgctcggtgaaactgcaccttctagaacatgaagatcgatgcctgtaatatcagcaagcgattgacgtacattgtgatccgaagctttgcatccaacacgctgccagtcctttgaaaagaaccagacgtcaggtggagcaatgagctcttgcaaagtccatcctcgggtgaaccatcgactatcatggcacaatacgtaaaagtgatcaagccacacgtcgttagggaacgtgaagaactcgacatcttccaagaatgcatagcagattgacgcttctcgataccatcgaaacatggagtttattgcttcggacaattcagcactgctggtcttgtcgatgcaacaagtgtcaatccagatgtagtcgtatccatttcgggccgctaatgcagacgcgcctcgcagcttatggtaaccttttttctccttgattgctgacgctgtctgcgataatgattgagtccatcgccggcgacctggattttgaagatcttgaaacgagatttcttctgcaccccaggtgtgggatagaatcgcgtatggtgggacagaaccctcattaaactcttctagttcaattttgtcgagattactgatccgaagcagccgcatgatagcgcctccctgcgcaagatgcagccgagtctacctaagcagaggaactgaggacgaaatggcttatcccatatgcccaatgagtacgcgggaattgggagctgcaatgataatcccgcatcgagcgctcaattatctcacgatagtgaacaaaaacccatggcttttgcttgttggtgattcgcctgtaactacctggcgggggtgcgattgacctcgatgagagtataggagctgttttgttgtcgaattgcacatctcggcgacgcgtatggttttggagtccatggcttttctctgctgcgccaaatcaggtggagaatgtaacagcagtttcagctctgagccagtggggtagaccaaaaacaccccgacaggggatttaggcgactcagcc

SEQ ID NO: 39819 - DNA, 1344 bp, Muscodor strobelii
  misc_feature: SGI cDNA ID NO. 573868
  misc_feature: Encodes the peptide sequence at SEQ ID NO 39820
atgattagtgagcgattgacgatacacacatcttgccttttcaacgcgcaacagaagtgtttcgagaacgaaatttcgatcgaagtcaatattcagactggattgataacacgagtatacaagcgcagtcagagcttgcccgatcatgacctctctagtgaagcagaaaacatcatcgatctccgacgcttcacagtgctccctggtcttgtcgatgctcacacacatatcttcttacacgcctattctgagaccccagctctaaatcaaatgagagatgagagttatgtcgagagaatcgttcgggcaaccaatcatgctacgactgcacttatggctggctatacaacataccgcgatctgggcaccgaaggtttacgagatgccgacgtgcattttagaaatgccatcaaccgtggaatcatcaaaggaccacgcatgtttgtcgcatcagagtgcatcgcatctagtggaggttacgaaatcaggcatgagaataatttgccaggcggcctaggaacttcagttccaaggatatccgatcccgcagatggaccttggggtgttcgcgccgccgtgcgacggcgtatcgccgaaggtgcggatatcgtgaagttttatgccgattatcgtaaacggcgattgcgatatccagagccggcatggccaggcgcaaaagaaatcgagtttccgccgtccgatgatgtgctctcgggcgaccagaatgtgaaccctgacgtacttctattcaccgaggaggagatcggcgcaatggtatcagaagcaaagagaagtggggttccaatcgcagcgcatgctataagcccagaagcgatcctcatggcatctaacgctggtgttacgacaatcgagcatgggtttggaatgaacgatgaatgcttagatgcactcaaagccaacgagacaatgtttgttccgactcttgctgtgctcgatgaggagctgagaagaggcgatgatgctgatcggtcaccggacatggatgaagcatttcgacaaattctagcttataccaaggccgctttcgacaaaggcattaaaatcgcgtgtggtggagacaccggtgcattcccccacggcgagaatattcgtgagttagagctgatggtggaagctggaattccgcaactagacgtactccaagccgccacactcaatggctggaaagcctgtggaggtgatctctgtgggcgaaggttcgggtcacttgaaaagggcttcgcagccgatatcatcgctttgcaaggggatttatgtgatggcaatcttgatgctcttcgtcgagttcactttgtaatgaaagatggacgggtttgcaagtaa

SEQ ID NO: 39820 - protein, 447 aa, Muscodor strobelii
  misc_feature: SGI Peptide ID NO. 573868
  misc_feature (65)..(422): Pfam Id: PF01979 Pfam Desc: Amidohydrolase family
  misc_feature (65)..(420): Pfam Id: PF07969 Pfam Desc: Amidohydrolase family
  misc_feature (250)..(422): Pfam Id: PF01979 Pfam Desc: Amidohydrolase family
  misc_feature (65)..(213): Pfam Id: PF01979 Pfam Desc: Amidohydrolase family
  misc_feature (8)..(445): NCBI GI: 154315918 Blast Desc: BC1G_04531 [Botryotinia fuckeliana B05.10] gi|150846927|gb|EDN22120.1| BC1G_04531 [Botryotinia fuckeliana B05.10]
  misc_feature (6)..(447): NCBI GI: 212545568 Blast Desc: conserved [Penicillium marneffei ATCC 18224] gi|210065907|gb|EEA20001.1| conserved [Penicillium marneffei ATCC 18224]
  misc_feature (3)..(447): NCBI GI: 171683863 Blast Desc: protein product [Podospora anserina] gi|170941892|emb|CAP67544.1| protein product [Podospora anserina]
  misc_feature (3)..(447): NCBI GI: 85116147 Blast Desc: NCU02597 [Neurospora crassa OR74A] gi|28926800|gb|EAA35764.1| [Neurospora crassa OR74A]
  misc_feature (7)..(447): NCBI GI: 256725521 Blast Desc: NECHADRAFT_55674 [Nectria haematococca mpVI 77-13-4]
  misc_feature (5)..(447): NCBI GI: 145250917 Blast Desc: An15g04370 [Aspergillus niger] gi|134082498|emb|CAK97304.1| protein product [Aspergillus niger]
  misc_feature (6)..(447): NCBI GI: 116193123 Blast Desc: CHGG_06279 [Chaetomium globosum CBS 148.51] gi|88182192|gb|EAQ89660.1| CHGG_06279 [Chaetomium globosum CBS 148.51]
  misc_feature (149)..(447): NCBI GI: 190348594 Blast Desc: PGUG_05172 [Pichia guilliermondii ATCC 6260]
  misc_feature (149)..(447): NCBI GI: 146414493 Blast Desc: PGUG_05172 [Pichia guilliermondii ATCC 6260]
  misc_feature (47)..(447): NCBI GI: 116624571 Blast Desc: amidohydrolase [Solibacter usitatus Ellin6076] gi|116227733|gb|ABJ86442.1| amidohydrolase [Candidatus Solibacter usitatus Ellin6076]
MISERLTIHTSCLFNAQQKCFENEISIEVNIQTGLITRVYKRSQSLPDHDLSSEAENIIDLRRFTVLPGLVDAHTHIFLHAYSETPALNQMRDESYVERIVRATNHATTALMAGYTTYRDLGTEGLRDADVHFRNAINRGIIKGPRMFVASECIASSGGYEIRHENNLPGGLGTSVPRISDPADGPWGVRAAVRRRIAEGADIVKFYADYRKRRLRYPEPAWPGAKEIEFPPSDDVLSGDQNVNPDVLLFTEEEIGAMVSEAKRSGVPIAAHAISPEAILMASNAGVTTIEHGFGMNDECLDALKANETMFVPTLAVLDEELRRGDDADRSPDMDEAFRQILAYTKAAFDKGIKIACGGDTGAFPHGENIRELELMVEAGIPQLDVLQAATLNGWKACGGDLCGRRFGSLEKGFAADIIALQGDLCDGNLDALRRVHFVMKDGRVCK

SEQ ID NO: 39821 - DNA, 1562 bp, Muscodor strobelii
  misc_feature: SGI EST ID NO. CUFF.96192.0
  misc_feature: Variant of the nucleotide sequence at SEQ ID NO 39819
cttcacgtcaatgcttttcgtatcactattgttaaaaaatttattgcgtttttgcttggaagtcaatcctttggatccgacagcggcgtcttatacatatattgaaacacccaccatgattagtgagcgattgacgatacacacatcttgccttttcaacgcgcaacagaagtgtttcgagaacgaaatttcgatcgaagtcaatattcagactggattgataacacgagtatacaagcgcagtcagagcttgcccgatcatgacctctctagtgaagcagaaaacatcatcgatctccgacgcttcacagtgctccctggtcttgtcgatgctcacacacatatcttcttacacgcctattctgagaccccagctctaaatcaaatgagagatgagagttatgtcgagagaatcgttcgggcaaccaatcatgctacgactgcacttatggctggctatacaacataccgcgatctgggcaccgaaggtttacgagatgccgacgtgcattttagaaatgccatcaaccgtggaatcatcaaaggaccacgcatgtttgtcgcatcagagtgcatcgcatctagtggaggttacgaaatcaggcatgagaataatttgccaggcggcctaggaacttcagttccaaggatatccgatcccgcagatggaccttggggtgttcgcgccgccgtgcgacggcgtatcgccgaaggtgcggatatcgtgaagttttatgccgattatcgtaaacggcgattgcgatatccagagccggcatggccaggcgcaaaagaaatcgagtttccgccgtccgatgatgtgctctcgggcgaccagaatgtgaaccctgacgtacttctattcaccgaggaggagatcggcgcaatggtatcagaagcaaagagaagtggggttccaatcgcagcgcatgctataagcccagaagcgatcctcatggcatctaacgctggtgttacgacaatcgagcatgggtttggaatgaacgatgaatgcttagatgcactcaaagccaacgagacaatgtttgttccgactcttgctgtgctcgatgaggagctgagaagaggcgatgatgctgatcggtcaccggacatggatgaagcatttcgacaaattctagcttataccaaggccgctttcgacaaaggcattaaaatcgcgtgtggtggagacaccggtgcattcccccacggcgagaatattcgtgagttagagctgatggtggaagctggaattccgcaactagacgtactccaagccgccacactcaatggctggaaagcctgtggaggtgatctctgtgggcgaaggttcgggtcacttgaaaagggcttcgcagccgatatcatcgctttgcaaggggatttatgtgatggcaatcttgatgctcttcgtcgagttcactttgtaatgaaagatggacgggtttgcaagtaaacagtttgagggaccattcagctgacagcgtcggagctggagtgcacttgtagggcatagagcgtctcagaacagtttaacagaacgaatattccgctccaat

SEQ ID NO: 39822 - DNA, 1440 bp, Muscodor strobelii
  misc_feature: SGI cDNA ID NO. 573869
  misc_feature: Encodes the peptide sequence at SEQ ID NO 39823
atgtctccagaattgaataagcccgatgccaatgacgcatctctgaaccatgactttcataatgcatggggcagtgtctataccagtcggagtactgtcgacgacgagcatatactaccgttatggcagctatatgcagtcgataagggcgctgttgatagacagtacaaggtgcttttggacgagtatacagaactctttcagaagatgtttggcggatattatccaatctcgttacatgcccatgcgacagattctctcacaccaactaccatcgccagtcttatcctcaataccgctgccaccagtaacctcgtgttggattcacctattctcaaacccaagtccgatgaaaagcctgaggagacaggaatgagagtacgcgcgttcgcgctcgacttcctggggtgggatgaaacacatgttatcacacccaacttcattgtagctcataacgtctatggggcgggctatggtccactagcgcacgcatcgaaagagtgggagacaaacgctatcgcatctggacctaagccggtcattatcaacatgaaacatctaagcgctgaagagatgtccgcacagtttgctgcagctaaagcaacaggctgtattgcagtggtgttcgacataatcagcaccgaggacggagaagttttaccaccggagacattcggtatcattaaagagtgctgtgcccgaaaccgtctgttactcgtcattgatgagacaatgtctgcgctccgctgcggtgcaccattcgcatttcagagacgagaatacgctcagcagggactagactttcaacccgatctcgtcatctttggcaagggaattggcgtgagtggtatcgccatgaatttcagcggtattatgacagaaggcctcaagtatactgaaaaagaagatatttatcaaacgattaggtattggagggcgatggtgagccgtccgatacgattgccgatactgctcgaagcgctcagtatacttcgggcagccaaggcagagaattgggctgagaacagcgagcggatcggacagacaattcggcaaatcttatatgagctggaaccggaaacgaaggggaaagacgtgatacggagtctcggatccgtggttgtcatcaacagggaattggcaatcaaataccgaatcatgtgtgccattcggcggcgtagcccttgggctcgtttgcttcccagactcagcagctcctctgcggatcgcgatgcgctcatgcaacaagtatttggcccgaataccaaacatcaaaggcgaattctagcagaagaggcggaaacactaggcacaattcctctatggtgctttatttgcggaatagaagcaacttcggaggattggtgtcggacatgttacttatcatattgcaccaatgaggtatgtattgcggcatttcatagacatgcatgtgcatag

SEQ ID NO: 39823 - protein, 479 aa, Muscodor strobelii
  misc_feature: SGI Peptide ID NO. 573869
  misc_feature (16)..(455): NCBI GI: 239608055 Blast Desc: conserved [Ajellomyces dermatitidis ER-3]
  misc_feature (16)..(461): NCBI GI: 261200116 Blast Desc: conserved [Ajellomyces dermatitidis SLH14081] gi|239594667|gb|EEQ77248.1| conserved [Ajellomyces dermatitidis SLH14081]
  misc_feature (4)..(444): NCBI GI: 225560940 Blast Desc: conserved [Ajellomyces capsulatus G186AR]
  misc_feature (4)..(445): NCBI GI: 240280504 Blast Desc: conserved [Ajellomyces capsulatus H143]
  misc_feature (4)..(445): NCBI GI: 154277788 Blast Desc: [Ajellomyces capsulatus NAm1] gi|150413312|gb|EDN08695.1| [Ajellomyces capsulatus NAm1]
  misc_feature (77)..(450): NCBI GI: 116208274 Blast Desc: [Chaetomium globosum CBS 148.51] gi|88184027|gb|EAQ91495.1| [Chaetomium globosum CBS 148.51]
  misc_feature (6)..(408): NCBI GI: 238483899 Blast Desc: conserved [Aspergillus flavus NRRL3357] gi|220701238|gb|EED57576.1| conserved [Aspergillus flavus NRRL3357]
  misc_feature (245)..(478): NCBI GI: 169767078 Blast Desc: [Aspergillus oryzae RIB40] gi|83765865|dbj|BAE56008.1| protein product [Aspergillus oryzae]
  misc_feature (132)..(459): NCBI GI: 261352750 Blast Desc: conserved [Verticillium albo-atrum VaMs.102]
  misc_feature (12)..(162): NCBI GI: 169767080 Blast Desc: [Aspergillus oryzae RIB40] gi|83765866|dbj|BAE56009.1| protein product [Aspergillus oryzae]
MSPELNKPDANDASLNHDFHNAWGSVYTSRSTVDDEHILPLWQLYAVDKGAVDRQYKVLLDEYTELFQKMFGGYYPISLHAHATDSLTPTTIASLILNTAATSNLVLDSPILKPKSDEKPEETGMRVRAFALDFLGWDETHVITPNFIVAHNVYGAGYGPLAHASKEWETNAIASGPKPVIINMKHLSAEEMSAQFAAAKATGCIAVVFDIISTEDGEVLPPETFGIIKECCARNRLLLVIDETMSALRCGAPFAFQRREYAQQGLDFQPDLVIFGKGIGVSGIAMNFSGIMTEGLKYTEKEDIYQTIRYWRAMVSRPIRLPILLEALSILRAAKAENWAENSERIGQTIRQILYELEPETKGKDVIRSLGSVVVINRELAIKYRIMCAIRRRSPWARLLPRLSSSSADRDALMQQVFGPNTKHQRRILAEEAETLGTIPLWCFICGIEATSEDWCRTCYLSYCTNEVCIAAFHRHACA

SEQ ID NO: 39824 - DNA, 1536 bp, Muscodor strobelii
  misc_feature: SGI cDNA ID NO. 573870
  misc_feature: Encodes the peptide sequence at SEQ ID NO 39825
atgtcatcacgactagcagatcatctcatagatctcggtgtggggccagaaatttttgtattcagttgctttgagagatcgacttgggccattgtcgcccgtcttgctatcttgcgagcaggcggtgcttacgtctctatattcgctagcaatcctccggcgtatctcgaatcagtcgttagtcgaacaaaggctcgcatactactcaccgatgaacgcttcgtcgcacgctttcagggcgtagttgagacgcttattccaatatcgttcggatttttgcggtcgctgccctcattaaaacggagatgtccaagtgtgcgtccagataatgcttgtttggtgctcttcacttctggtagcacgggagcccccaaaggcatcattcagactcaccaaggctactcctccgcaataagtaactatgcgcgagatgttggtctcgattcagagacgcggtttctgcaatttgatgactacgcctttgacatcagcaacctagaattccttgtgcctctgattctcggaggatgctgctgcgttcctagaccaactagcacaatacaagaactggcaagtgagatgaactcactccgcgccaacactgtcttcctcacccccacggtagcaatcaaacttaacccagaggatgttcccaatctccggaagctttgcgtcgggggagaaccacttcctaaagaactcgttcggaaatgggatagcagcaacacgaaactgatcaatcaatacggcatgggcgaagtagctatttgttgtgctctcaacttagacgtcgacccactggcgggcacagttgtcgggcgcccatcgacagggactatctggctcgttaacccctcgtcgcctagcaagttgatgccaattggggcaacaggagaaatagttgttgaagggccgcacttgtcacgaggatatcttgatgagactgcaataaagcgtactgaagcaggatttctgcaaaatataccgccatggcttgcagtttcacatccggataggagaacggcacgaatgtatcggtcaggtgacctcggtcgcatcaatcacgacgggacaataacataccttgggcgcaaggacacgatcctgaaacttgacggctgtcgcatcgatgcgctcgaagtggagcaccagggcaaaaagtgtctatccgacaaggacacacttattatagatctgctcgggatcattgaccggcatgatgggcagtgcttggctgccttgctttaccttgatgagcatccgaacaataccgctcctttggcgaatggcttccccagtcttcaagacgctacaacagatccctttgcccgaaacaaggttgaagagatcaaagactcgattgctgtatcccttccgcattacatgatgccaacgatgtttgtctctatgtcttggttaccacggacagcttcgaggaaaatcgaccgcaagaagattcacatgctggggcagctgtactatacttcgcagatgaaaactcgacgcaaggacatttcatacgctgatagaatttga

SEQ ID NO: 39825 - protein, 511 aa, Muscodor strobelii
  misc_feature: SGI Peptide ID NO. 573870
  misc_feature (1)..(396): Pfam Id: PF00501 Pfam Desc: AMP-binding enzyme
  misc_feature (2)..(384): Pfam Id: PF00501 Pfam Desc: AMP-binding enzyme
  misc_feature (1)..(510): NCBI GI: 67902892 Blast Desc: AN8433.2 [Aspergillus nidulans FGSC A4] gi|40747899|gb|EAA67055.1| AN8433.2 [Aspergillus nidulans FGSC A4]
  misc_feature (1)..(510): NCBI GI: 259484374 Blast Desc: TPA: conserved [Aspergillus nidulans FGSC A4]
  misc_feature (1)..(503): NCBI GI: 238483901 Blast Desc: AMP dependent ligase, [Aspergillus flavus NRRL3357] gi|220701239|gb|EED57577.1| AMP dependent ligase, [Aspergillus flavus NRRL3357]
  misc_feature (1)..(510): NCBI GI: 116208272 Blast Desc: CHGG_03429 [Chaetomium globosum CBS 148.51] gi|88184026|gb|EAQ91494.1| CHGG_03429 [Chaetomium globosum CBS 148.51]
  misc_feature (1)..(503): NCBI GI: 169767082 Blast Desc: [Aspergillus oryzae RIB40] gi|83765867|dbj|BAE56010.1| protein product [Aspergillus oryzae]
  misc_feature (1)..(497): NCBI GI: 225556087 Blast Desc: conserved [Ajellomyces capsulatus G186AR]
  misc_feature (1)..(494): NCBI GI: 225680355 Blast Desc: conserved [Paracoccidioides brasiliensis Pb03]
  misc_feature (1)..(494): NCBI GI: 261190738 Blast Desc: lysergyl peptide synthetase LpsB [Ajellomyces dermatitidis SLH14081] gi|239591201|gb|EEQ73782.1| lysergyl peptide synthetase LpsB [Ajellomyces dermatitidis SLH14081] LpsB
  misc_feature (1)..(499): NCBI GI: 255955117 Blast Desc: Pc21g12840 [Penicillium chrysogenum Wisconsin 54-1255] gi|211590022|emb|CAP96181.1| Pc21g12840 [Penicillium chrysogenum Wisconsin 54-1255]
  misc_feature (1)..(496): NCBI GI: 115443434 Blast Desc: [Aspergillus terreus NIH2624] gi|114188393|gb|EAU30093.1| [Aspergillus terreus NIH2624]
  misc_feature (2)..(486): SWISSPROT Homolog: EC 5.1.1.13 Aspartate racemase
  misc_feature (2)..(486): SWISSPROT Homolog: EC 5.1.1.11 Phenylalanine racemase (ATP-hydrolyzing)
MSSRLADHLIDLGVGPEIFVFSCFERSTWAIVARLAILRAGGAYVSIFASNPPAYLESVVSRTKARILLTDERFVARFQGVVETLIPISFGFLRSLPSLKRRCPSVRPDNACLVLFTSGSTGAPKGIIQTHQGYSSAISNYARDVGLDSETRFLQFDDYAFDISNLEFLVPLILGGCCCVPRPTSTIQELASEMNSLRANTVFLTPTVAIKLNPEDVPNLRKLCVGGEPLPKELVRKWDSSNTKLINQYGMGEVAICCALNLDVDPLAGTVVGRPSTGTIWLVNPSSPSKLMPIGATGEIVVEGPHLSRGYLDETAIKRTEAGFLQNIPPWLAVSHPDRRTARMYRSGDLGRINHDGTITYLGRKDTILKLDGCRIDALEVEHQGKKCLSDKDTLIIDLLGIIDRHDGQCLAALLYLDEHPNNTAPLANGFPSLQDATTDPFARNKVEEIKDSIAVSLPHYMMPTMFVSMSWLPRTASRKIDRKKIHMLGQLYYTSQMKTRRKDISYADRI

SEQ ID NO: 39826 - DNA, 415 bp, Muscodor strobelii
  misc_feature: SGI EST ID NO. CUFF.96207.0
  misc_feature: Variant of the nucleotide sequence at SEQ ID NO 39824
tcgctagcaatcctccggcgtatctcgaatcagtcgttagtcgaacaaaggctcgcatactactcaccgatgaacgcttcgtcgcacgctttcagggcgtagttgagacgcttattccaatatcgttcggatttttgcggtcgctgccctcattaaaacggagatgtccaagtgtgcgtccagataatgcttgtttggtgctcttcacttctggtagcacgggagcccccaaaggcatcattcagactcaccaaggctactcctccgcaataagtaactatgcgcgagatgttggtctcgattcagagacgcggtttctgcaatttgatgactacgcctttgacatcagcaacctagaattccttgtgcctctgattctcggaggatgctgctgcgttcctagaccaactagcac

SEQ ID NO: 39827 - DNA, 837 bp, Muscodor strobelii
  misc_feature: SGI cDNA ID NO. 573871
  misc_feature: Encodes the peptide sequence at SEQ ID NO 39828
atgtcgggccaagaaccgcgatatttgcttccgaagccagagaaagagattgcgcgactgacagagcaagacgcggtcattacagcgatcatgggcaataagcgagttttggcgcctgtcgatttcaataagcaagggttgcagattttagattctggaacggccgacggtcttttcttacgcagtatccagccactattgaccaacgcaccatacacgctcttggggtacgattttataaaaagcttcttcccgaaccaagcaccgccatgtacaacttttgccctgcctgacatcgccgagccatggccggtggggctccattatacgtgtgatttcgtgcatcagcggttcacgattccgggagtagagatggatgtgatgcgtggcgaacatggcccagaaatgcgcgacgcatggacagcaaccggcgcgtttctaaccaaggctggagcaggtgttgattacgctaaagatatgtcaggctggctcgaggaggaaggcttccaaggtgtagaggccatcaatgtcgatctccccgtcggagcgcggtgtaagtcgcctgaatggggtgcgagggctgccaaagtcctgttcgagtcctttaccgccgtcatcggcgcctgcaaaggtcaggatgtgtcagaccctgccttcttgagagctattggcttgactggcatatttcaagtgcattcgctgaccaatgatctaaatttagcgatgaatgtcaaccttgaccccgtcgtgcaggacgtagataatctgcctgagcgagcgcgtgtcgagatggagaaggatggcggcatatatcctctcgtctttgctattggttag

SEQ ID NO: 39828 - protein, 278 aa, Muscodor strobelii
  misc_feature: SGI Peptide ID NO. 573871
  misc_feature (5)..(206): NCBI GI: 256723271 Blast Desc: NECHADRAFT_51927 [Nectria haematococca mpVI 77-13-4]
  misc_feature (8)..(200): NCBI GI: 119470768 Blast Desc: NFIA_055410 [Neosartorya fischeri NRRL 181] gi|119406241|gb|EAW16192.1| conserved [Neosartorya fischeri NRRL 181]
  misc_feature (8)..(200): NCBI GI: 70992025 Blast Desc: methyltransferase GliN [Aspergillus fumigatus Af293] gi|66848494|gb|EAL88823.1| methyltransferase GliN [Aspergillus fumigatus Af293] gi|159124429|gb|EDP49547.1| methyltransferase
  misc_feature (5)..(218): NCBI GI: 38098858 Blast Desc: [Leptosphaeria maculans]
  misc_feature (8)..(200): NCBI GI: 56609351 Blast Desc: GliN [Aspergillus fumigatus]
  misc_feature (2)..(205): NCBI GI: 116194988 Blast Desc: CHGG_04092 [Chaetomium globosum CBS 148.51] gi|88180005|gb|EAQ87473.1| CHGG_04092 [Chaetomium globosum CBS 148.51]
  misc_feature (14)..(186): NCBI GI: 242815587 Blast Desc: methyltransferase SirN-like, [Talaromyces stipitatus ATCC 10500] gi|218714937|gb|EED14360.1| methyltransferase SirN-like, [Talaromyces stipitatus ATCC 10500]
  misc_feature (2)..(210): NCBI GI: 55823914 Blast Desc: methyltransferase [Fusarium heterosporum]
  misc_feature (11)..(211): NCBI GI: 212529358 Blast Desc: conserved [Penicillium marneffei ATCC 18224] gi|210074234|gb|EEA28321.1| conserved [Penicillium marneffei ATCC 18224]
  misc_feature (16)..(278): NCBI GI: 70983245 Blast Desc: methyltransferase SirN-like [Aspergillus fumigatus Af293] gi|66844775|gb|EAL85112.1| methyltransferase SirN-like, [Aspergillus fumigatus Af293] gi|159124035|gb|EDP49154.1| A1163]
MSGQEPRYLLPKPEKEIARLTEQDAVITAIMGNKRVLAPVDFNKQGLQILDSGTADGLFLRSIQPLLTNAPYTLLGYDFIKSFFPNQAPPCTTFALPDIAEPWPVGLHYTCDFVHQRFTIPGVEMDVMRGEHGPEMRDAWTATGAFLTKAGAGVDYAKDMSGWLEEEGFQGVEAINVDLPVGARCKSPEWGARAAKVLFESFTAVIGACKGQDVSDPAFLRAIGLTGIFQVHSLTNDLNLAMNVNLDPVVQDVDNLPERARVEMEKDGGIYPLVFAIG

SEQ ID NO: 39829 - DNA, 765 bp, Muscodor strobelii
  misc_feature: SGI cDNA ID NO. 573872
  misc_feature: Encodes the peptide sequence at SEQ ID NO 39830
atggactgcagcaataatccaatgtacagagactggcctctatcgctgattcctaccccaaagtcacaaagcggcaaggacgatgctttcacaatcgaagcctcccacatggctttaagccacaatgccttcattcgcggcttcaatagtatttaccagcaggcgcctcgtctgaaactcgatgttgacaaatccgattttgttggatactgcttatcctgggttggatgtgtcgtgacccatcatcagtacgaagaaaccaagctctttcccgcgattaataaagccgccggattgaagggtttgatggacgctgccgtccatgaacatgaaactttctatggcggcatggaccggatgaagaagtacctagagaccgaaggcgccaaattctctagcacagagttaatcaagataatggactctttcaaggacgctcttcatagccatctcaaggcggagccacccacaattgtctcgctcgcggaacatagtaccgctgaaaggcccattgacattcttagcatttcagatactgctgggaaaaaacaggtcagcctgaacttcatgttcaacaccttacctgttttctttctcaacatggagactgccgtgtttgaggatgggatgtggcatgaagtgttccctcctttcaagggcgcactgagggtaataatgcttcggcttgtaccgctatggcaatcgcgaaggtggcgatttgtgagttgtgggcacgacggtcaggttaaacccttagcgttctga

SEQ ID NO: 39830 - protein, 254 aa, Muscodor strobelii
  misc_feature: SGI Peptide ID NO. 573872
  misc_feature (33)..(92): Pfam Id: PF01814 Pfam Desc: Hemerythrin HHE cation binding domain
  misc_feature (7)..(253): NCBI GI: 225562331 Blast Desc: hemerythrin HHE cation binding domain-containing protein [Ajellomyces capsulatus G186AR]
  misc_feature (7)..(253): NCBI GI: 261201472 Blast Desc: conserved [Ajellomyces dermatitidis SLH14081] gi|239592195|gb|EEQ74776.1| conserved [Ajellomyces dermatitidis SLH14081]
  misc_feature (7)..(253): NCBI GI: 239611646 Blast Desc: conserved [Ajellomyces dermatitidis ER-3]
  misc_feature (78)..(249): NCBI GI: 154312535 Blast Desc: BC1G_05870 [Botryotinia fuckeliana B05.10] gi|150849971|gb|EDN25164.1| BC1G_05870 [Botryotinia fuckeliana B05.10]
  misc_feature (9)..(252): NCBI GI: 171695548 Blast Desc: protein product [Podospora anserina] gi|170948016|emb|CAP60180.1| protein product [Podospora anserina]
  misc_feature (9)..(252): NCBI GI: 261361330 Blast Desc: conserved [Verticillium albo-atrum VaMs.102]
  misc_feature (9)..(252): NCBI GI: 164428650 Blast Desc: NCU00867 [Neurospora crassa OR74A] gi|157072229|gb|EAA35547.2| conserved [Neurospora crassa OR74A]
  misc_feature (8)..(252): NCBI GI: 242808174 Blast Desc: conserved [Talaromyces stipitatus ATCC 10500] gi|218715733|gb|EED15155.1| conserved [Talaromyces stipitatus ATCC 10500]
  misc_feature (8)..(252): NCBI GI: 212537829 Blast Desc: conserved [Penicillium marneffei ATCC 18224] gi|210068812|gb|EEA22903.1| conserved [Penicillium marneffei ATCC 18224]
  misc_feature (9)..(251): NCBI GI: 256734785 Blast Desc: [Nectria haematococca mpVI 77-13-4]
MDCSNNPMYRDWPLSLIPTPKSQSGKDDAFTIEASHMALSHNAFIRGFNSIYQQAPRLKLDVDKSDFVGYCLSWVGCVVTHHQYEETKLFPAINKAAGLKGLMDAAVHEHETFYGGMDRMKKYLETEGAKFSSTELIKIMDSFKDALHSHLKAEPPTIVSLAEHSTAERPIDILSISDTAGKKQVSLNFMFNTLPVFFLNMETAVFEDGMWHEVFPPFKGALRVIMLRLVPLWQSRRWRFVSCGHDGQVKPLAF

SEQ ID NO: 39831 - DNA, 552 bp, Muscodor strobelii
  misc_feature: SGI EST ID NO. CUFF.96219.0
  misc_feature: Variant of the nucleotide sequence at SEQ ID NO 39829
gtggcattgggggcagagtgcaccatacatcctcgtttttgaactggaactcacccgtaaccatcgcgggccacggcaggggcttcagcgattggaccccgcccctcgaattttcctgctctcaaccccggacatctgtcagtatagttatcgggtagacgaatgcctccgaccagttctgtaacttgatctatcgaagtaatagcttatttgcgagttgggaagtgctcagttcttcgttgatgcaatcgattcaatctattttcgtgtgttagccatggactgcagcaataatccaatgtacagagactggcctctatcgctgattcctaccccaaagtcacaaagcggcaaggacgatgctttcacaatcgaagcctcccacatggctttaagccacaatgccttcattcgcggcttcaatagtatttaccagcaggcgcctcgtctgaaactcgatgttgacaaatccgattttgttggatactgcttatcctgggttggatgtgtcgtgacccatcatcagtacgaagaaaccaagctctttcccgc

SEQ ID NO: 39832 - DNA, 828 bp, Muscodor strobelii
  misc_feature: SGI cDNA ID NO. 573873
  misc_feature: Encodes the peptide sequence at SEQ ID NO 39833
atggactgcagcaataatccaatgtacagagactggcctctatcgctgattcctaccccaaagtcacaaagcggcaaggtaatttggcaagacttctttcattcgacgctgacagctaagtttgggtgtaatatctttcaggacgatgctttcacaatcgaagcctcccacatggctttaagccacaatgccttcattcgcggcttcaatagtatttaccagcaggcgcctcgtctgaaactcgatgttgacaaatccgattttgttggatactgcttatcctgggttggatgtgtcgtgacccatcatcagtacgaagaaaccaagctctttcccgcgattaataaagccgccggattgaagggtttgatggacgctgccgtccatgaacatgaaactttctatggcggcatggaccggatgaagaagtacctagagaccgaaggcgccaaattctctagcacagagttaatcaagataatggactctttcaaggacgctcttcatagccatctcaaggcggagccacccacaattgtctcgctcgcggaacatagtaccgctgaaaggcccattgacattcttagcatttcagatactgctgggaaaaaacaggtcagcctgaacttcatgttcaacaccttacctgttttctttctcaacatggagactgccgtgtttgaggatgggatgtggcatgaagtgttccctcctttcaagggcgcactgagggtaataatgcttcggcttgtaccgctatggcaatcgcgaaggtggcgatttgtgagttgtgggcacgacggtcaggttaaacccttagcgttctga

SEQ ID NO: 39833 - protein, 275 aa, Muscodor strobelii
  misc_feature: SGI Peptide ID NO. 573873
  misc_feature (54)..(113): Pfam Id: PF01814 Pfam Desc: Hemerythrin HHE cation binding domain
  misc_feature (7)..(274): NCBI GI: 225562331 Blast Desc: hemerythrin HHE cation binding domain-containing protein [Ajellomyces capsulatus G186AR]
  misc_feature (7)..(274): NCBI GI: 261201472 Blast Desc: conserved [Ajellomyces dermatitidis SLH14081] gi|239592195|gb|EEQ74776.1| conserved [Ajellomyces dermatitidis SLH14081]
  misc_feature (7)..(274): NCBI GI: 239611646 Blast Desc: conserved [Ajellomyces dermatitidis ER-3]
  misc_feature (99)..(270): NCBI GI: 154312535 Blast Desc: BC1G_05870 [Botryotinia fuckeliana B05.10] gi|150849971|gb|EDN25164.1| BC1G_05870 [Botryotinia fuckeliana B05.10]
  misc_feature (9)..(273): NCBI GI: 171695548 Blast Desc: protein product [Podospora anserina] gi|170948016|emb|CAP60180.1| protein product [Podospora anserina]
  misc_feature (9)..(273): NCBI GI: 261361330 Blast Desc: conserved [Verticillium albo-atrum VaMs.102]
  misc_feature (9)..(273): NCBI GI: 242808174 Blast Desc: conserved [Talaromyces stipitatus ATCC 10500] gi|218715733|gb|EED15155.1| conserved [Talaromyces stipitatus ATCC 10500]
  misc_feature (9)..(273): NCBI GI: 164428650 Blast Desc: NCU00867 [Neurospora crassa OR74A] gi|157072229|gb|EAA35547.2| conserved [Neurospora crassa OR74A]
  misc_feature (9)..(273): NCBI GI: 212537829 Blast Desc: conserved [Penicillium marneffei ATCC 18224] gi|210068812|gb|EEA22903.1| conserved [Penicillium marneffei ATCC 18224]
  misc_feature (9)..(272): NCBI GI: 256734785 Blast Desc: [Nectria haematococca mpVI 77-13-4]
MDCSNNPMYRDWPLSLIPTPKSQSGKVIWQDFFHSTLTAKFGCNIFQDDAFTIEASHMALSHNAFIRGFNSIYQQAPRLKLDVDKSDFVGYCLSWVGCVVTHHQYEETKLFPAINKAAGLKGLMDAAVHEHETFYGGMDRMKKYLETEGAKFSSTELIKIMDSFKDALHSHLKAEPPTIVSLAEHSTAERPIDILSISDTAGKKQVSLNFMFNTLPVFFLNMETAVFEDGMWHEVFPPFKGALRVIMLRLVPLWQSRRWRFVSCGHDGQVKPLAF

SEQ ID NO: 39834 - DNA, 450 bp, Muscodor strobelii
  misc_feature: SGI cDNA ID NO. 573874
  misc_feature: Encodes the peptide sequence at SEQ ID NO 39835
atgcccaaatctcaaaatcaacaaccagaaatagatttctggggtgttttcgcctgccagttcccaatcatcccttcagtagatgaattgttctgcagaatcatcaccctagcctatccaaacggtgtcctgactgacatgaacggcaaaaagctgccagtcaccgtcccatgcaagacagcaactcagcgacttgagcccatcatagaggcggccattgcccaagaggatctgttcatgaacagccagctagacaaacatggccttaagcgatgggacccgcggaactacgagaacttttgtaatttggagcaagccgagaaacaagtacgagaggcagttgctgggggacttgagcatctaaacttggtcttctggagcgcatactggagagtagttagagagtgtcagagggagagacgggatctattctggcagatgtttgtttga

SEQ ID NO: 39835 - protein, 149 aa, Muscodor strobelii
  misc_feature: SGI Peptide ID NO. 573874
MPKSQNQQPEIDFWGVFACQFPIIPSVDELFCRIITLAYPNGVLTDMNGKKLPVTVPCKTATQRLEPIIEAAIAQEDLFMNSQLDKHGLKRWDPRNYENFCNLEQAEKQVREAVAGGLEHLNLVFWSAYWRVVRECQRERRDLFWQMFV

SEQ ID NO: 39836 - DNA, 280 bp, Muscodor strobelii
  misc_feature: SGI EST ID NO. CUFF.96237.0
  misc_feature: Variant of the nucleotide sequence at SEQ ID NO 39834
ggggacttgagcatctaaacttggtcttctggagcgcatactggagagtagttagagagtgtcagagggagagacgggatctattctggcagatgtttgtttgagaagtattgtgtgtatgtgaggacagtgcggcggcgctcaagtctgggcttgccccttttcttcaacagcctatgtgattttgttgctgctctgcccctatttcacttgtaaatcacacattgctagatagtattcactgtatatcaccaagatatatagaactgcaccaattcta

SEQ ID NO: 39837 - DNA, 603 bp, Muscodor strobelii
  misc_feature: SGI cDNA ID NO. 573875
  misc_feature: Reduced expression when VOC is produced
  misc_feature: Encodes the peptide sequence at SEQ ID NO 39838
atgatttacgagatcttctttgcgctctggcgcgtcttccagatcatcactctgatccccattgttggcatgctagcctacttcgtcgacggctaccagaaggctaatctcctgaccccgaactacatccttatcctcttcatcgtctcggttctcgctgtcgtctgggccatctttaccatcttctcttaccatcgctcgtcgtccaatgccactttcgtcggcgttgtcgatctcctctttgtcggcgcattcattggcgctgtctacaccctgcgcttcattaccaacgccgactgcacccacattcgacccggctcttcagttgatctttcgttcggcatctttggtagtgccagcattaacggagtggatgtcaaggttgacaagacatgtgccatgctcaaggctgcttttgcattcggcatcatcaacaccatcttgttcttcttcacttccatccttgccttcatgcacggaaaccaccatcatgaccgtcgcgagactcgctatgtccgttcgactcactcccaccactcgcactcacgctcccgcaatggatcccatcattcgcaccactctcatcgccgcagctacgtttag

SEQ ID NO: 39838 - protein, 200 aa, Muscodor strobelii
  misc_feature: SGI Peptide ID NO. 573875
  misc_feature (1)..(174): NCBI GI: 116203735 Blast Desc: CHGG_09751 [Chaetomium globosum CBS 148.51] gi|88175879|gb|EAQ83347.1| CHGG_09751 [Chaetomium globosum CBS 148.51]
  misc_feature (1)..(176): NCBI GI: 156060981 Blast Desc: SS1G_02633 [Sclerotinia sclerotiorum 1980] gi|154700037|gb|EDN99775.1| SS1G_02633 [Sclerotinia sclerotiorum 1980]
  misc_feature (7)..(177): NCBI GI: 85093274 Blast Desc: NCU08169 [Neurospora crassa OR74A] gi|28921108|gb|EAA30425.1| conserved [Neurospora crassa OR74A]
  misc_feature (2)..(170): NCBI GI: 261358550 Blast Desc: conserved [Verticillium albo-atrum VaMs.102]
  misc_feature (1)..(171): NCBI GI: 39945878 Blast Desc: MGG_08059 [Magnaporthe grisea 70-15] gi|145019296|gb|EDK03524.1| MGG_08059 [Magnaporthe grisea 70-15]
  misc_feature (1)..(166): NCBI GI: 46126215 Blast Desc: FG07485.1 [Gibberella zeae PH-1]
  misc_feature (7)..(200): NCBI GI: 169596122 Blast Desc: SNOG_00813 [Phaeosphaeria nodorum SN15] gi|111071188|gb|EAT92308.1| SNOG_00813 [Phaeosphaeria nodorum SN15]
  misc_feature (1)..(200): NCBI GI: 171679369 Blast Desc: protein product [Podospora anserina] gi|170939310|emb|CAP64538.1| protein product [Podospora anserina]
  misc_feature (7)..(182): NCBI GI: 189201928 Blast Desc: conserved [Pyrenophora tritici-repentis Pt-1C-BFP] gi|187984399|gb|EDU49887.1| conserved [Pyrenophora tritici-repentis Pt-1C-BFP]
  misc_feature (7)..(162): NCBI GI: 256724713 Blast Desc: NECHADRAFT_8905 [Nectria haematococca mpVI 77-13-4]
  misc_feature: Useful for introducing or modulating the production of volatile compounds
MIYEIFFALWRVFQIITLIPIVGMLAYFVDGYQKANLLTPNYILILFIVSVLAVVWAIFTIFSYHRSSSNATFVGVVDLLFVGAFIGAVYTLRFITNADCTHIRPGSSVDLSFGIFGSASINGVDVKVDKTCAMLKAAFAFGIINTILFFFTSILAFMHGNHHHDRRETRYVRSTHSHHSHSRSRNGSHHSHHSHRRSYV

SEQ ID NO: 39839 - DNA, 1364 bp, Muscodor strobelii
  misc_feature: SGI EST ID NO. CUFF.96264.0
  misc_feature: Variant of the nucleotide sequence at SEQ ID NO 39837
atctcttgttagcacagcacaggtcgctccgtgctaccggtagtgtaagccctgtgcgattgctgctgagaaggtgcagggtgcgggtggagatcccatcatcccaccagtaaccagccatcgcatatttcgctgcacctcattaacccccccacgccgactcactctgccaacacaccacacttgcatcatcaccttctcttctctcgccgtcatcttgtcgtcgcacaagctctccaatccgcacgccggctttgttacgtcgatattttgatattcaccagtctctaccaattcacgcacctctcacactatcaccatgatttacgagatcttctttgcgctctggcgcgtcttccagatcatcactctgatccccattgttggcatgctagcctacttcgtcgacggctaccagaaggctaatctcctgaccccgaactacatccttatcctcttcatcgtctcggttctcgctgtcgtctgggccatctttaccatcttctcttaccatcgctcgtcgtccaatgccactttcgtcggcgttgtcgatctcctctttgtcggcgcattcattggcgctgtctacaccctgcgcttcattaccaacgccgactgcacccacattcgacccggctcttcagttgatctttcgttcggcatctttggtagtgccagcattaacggagtggatgtcaaggttgacaagacatgtgccatgctcaaggctgcttttgcattcggcatcatcaacaccatcttgttcttcttcacttccatccttgccttcatgcacggaaaccaccatcatgaccgtcgcgagactcgctatgtccgttcgactcactcccaccactcgcactcacgctcccgcaatggatcccatcattcgcaccactctcatcgccgcagctacgtttagacgagcgaggttgcagattgtttgtgttctgtcgataagttcaagatgtggagtaatgtgtacatgatgagagtgtacgtgtatatgagaagagtggaccagcatggttttatatacagagacatggcaacatgatgctatgcaagtgcctattgacctggaagaatatggtccatggctgtatagagaaaaacgacgagaatcatatggcatatgtgcatatgaacggcgagaattgcatgactggacggaataaggaacggattttgacactggcactgtatgggagttctggactagctttggctgtgaatttagcttatggttatgattattgatgaattaaggacacgattaactaaacactactgggcaaagcctacaatgtgatcacgatatatgagctcgagctaggcaactacgtgtaaagattatattactt

SEQ ID NO: 39840 - DNA, 1134 bp, Muscodor strobelii
  misc_feature: SGI cDNA ID NO. 573876
  misc_feature: Encodes the peptide sequence at SEQ ID NO 39841
atgccagctcatgaaacaagctactgcttcttcatcgatggactcgatgagtacactggcaactacaacgatgctatcatgttcatcgatcatttggccagctccacgaatttcaaattcttagtttccagccgaccaatcgtagaatgcgagcgagcatatggaaagggacctaaaatgaggctcgaggatctcactaagcaggaccttgaagtctatgtcacagaaagaggtgcgaagatgctctctgatttggtccataagtcgtctggtatctttctatggttgacactcgcttgcaaatctgtcttggagggttttgagaattatgacaacgttgacgaacttgaacgaagagtcggcgaactacccatggagctaagttcgcttttcaggcatatgttagagcagattcagccacggtaccaggagcaagcagcacggatgctttggcttgcttacgaacacttttccatacagcagtcccaccatctccacacagtttgcatggctacaatcgacgagtacgctacgagagacgaccgtactagcggtttaatcatgccgtctcagaaatatatgagttctcttcgtctcaaagagcgattgcaaagtcgatgtcgtgggttattagaacttgtcgagtataacgaccgggattacagcacctactacctatgtttctgctcaccaaagaggaaacaaaatgaagatgctcgccatgaacgcaaatggattcatgacactttgttagactcgactattcatttcttacatcgaagcgtgtttgaatttcttggaactccaggtattcgagaactcgaatgtttgaagctccgaaacaccttgattccacgacctatcttaatatttgcacaaatgtcacttgaattttttcgtttgaaagcaagcaactctcgcccccctgaacgctacacacatatcgagccagtagacgattacatgcgagataggctgctcttcatcgacaaagcaaacagcgagattgactgccgcctctcaatcgccgcactcaaaggcatggaagagattgtgcgagaacacggccaggacggagattcggaaactatgatgcactatattagcaaagaacgcaaaacttatacaacatag

SEQ ID NO: 39841 - protein, 377 aa, Muscodor strobelii
  misc_feature: SGI Peptide ID NO. 573876
  misc_feature (8)..(278): NCBI GI: 256721455 Blast Desc: NECHADRAFT_55084 [Nectria haematococca mpVI 77-13-4]
  misc_feature (9)..(278): NCBI GI: 46133835 Blast Desc: FG09057.1 [Gibberella zeae PH-1]
  misc_feature (10)..(278): NCBI GI: 256722211 Blast Desc: NECHADRAFT_86865 [Nectria haematococca mpVI 77-13-4]
  misc_feature (9)..(277): NCBI GI: 116205553 Blast Desc: CHGG_10660 [Chaetomium globosum CBS 148.51] gi|88176788|gb|EAQ84256.1| CHGG_10660 [Chaetomium globosum CBS 148.51]
  misc_feature (2)..(281): NCBI GI: 9453820 Blast Desc: related to small s protein [Neurospora crassa]
  misc_feature (10)..(213): NCBI GI: 256734179 Blast Desc: NECHADRAFT_35981 [Nectria haematococca mpVI 77-13-4]
  misc_feature (5)..(282): NCBI GI: 226293863 Blast Desc: conserved [Paracoccidioides brasiliensis Pb18]
  misc_feature (5)..(282): NCBI GI: 225684243 Blast Desc: conserved [Paracoccidioides brasiliensis Pb03]
  misc_feature (8)..(279): NCBI GI: 116198607 Blast Desc: CHGG_07459 [Chaetomium globosum CBS 148.51] gi|88178738|gb|EAQ86206.1| CHGG_07459 [Chaetomium globosum CBS 148.51]
  misc_feature (5)..(271): NCBI GI: 261190024 Blast Desc: conserved [Ajellomyces dermatitidis SLH14081] gi|239591250|gb|EEQ73831.1| conserved [Ajellomyces dermatitidis SLH14081]
MPAHETSYCFFIDGLDEYTGNYNDAIMFIDHLASSTNFKFLVSSRPIVECERAYGKGPKMRLEDLTKQDLEVYVTERGAKMLSDLVHKSSGIFLWLTLACKSVLEGFENYDNVDELERRVGELPMELSSLFRHMLEQIQPRYQEQAARMLWLAYEHFSIQQSHHLHTVCMATIDEYATRDDRTSGLIMPSQKYMSSLRLKERLQSRCRGLLELVEYNDRDYSTYYLCFCSPKRKQNEDARHERKWIHDTLLDSTIHFLHRSVFEFLGTPGIRELECLKLRNTLIPRPILIFAQMSLEFFRLKASNSRPPERYTHIEPVDDYMRDRLLFIDKANSEIDCRLSIAALKGMEEIVREHGQDGDSETMMHYISKERKTYTT

SEQ ID NO: 39842 - DNA, 474 bp, Muscodor strobelii
  misc_feature: SGI cDNA ID NO. 573877
  misc_feature: Reduced expression when VOC is produced
  misc_feature: Encodes the peptide sequence at SEQ ID NO 39843
atggcctttaggtcgcggctctcgtcggcgcagatcgcggcgggcatgaagctgggcccccaggagctctcgcagctggccggcaaggagctgcacggcatcgtcgtctccgcgggcctgatggacaagacggtcaaggtcaagctgggcggccagcggtacgagcccagagtccagaagtggttcaaggcgccccactacaagctggtccacgacccgcgcaactccctgcgcaagggcgacgtcgtcgccatccagtcctcctggcgcgagtctcagcacgtccgccacgtcgtcaagcacatcatcgccccctacggccagccccatcgaccagggccccccgtccccaccctcgaggaacgcgtcgccgagctcaccgccaagaggcagcagaaggacgaccgcagggccctgaggcggtccgccgaccttgccctgcaggacgcgagccaccccgctgcatcgccatga

SEQ ID NO: 39843 - protein, 157 aa, Muscodor strobelii
  misc_feature: SGI Peptide ID NO. 573877
  misc_feature (30)..(144): NCBI GI: 256732426 Blast Desc: NECHADRAFT_92396 [Nectria haematococca mpVI 77-13-4]
  misc_feature (30)..(138): NCBI GI: 46136673 Blast Desc: FG09852.1 [Gibberella zeae PH-1]
  misc_feature (24)..(142): NCBI GI: 261361144 Blast Desc: conserved [Verticillium albo-atrum VaMs.102]
  misc_feature (30)..(144): NCBI GI: 209736744 Blast Desc: Mitochondrial 37S ribosomal protein S17 [Salmo salar]
  misc_feature (29)..(146): NCBI GI: 116179644 Blast Desc: CHGG_00450 [Chaetomium globosum CBS 148.51] gi|88184747|gb|EAQ92215.1| CHGG_00450 [Chaetomium globosum CBS 148.51]
  misc_feature (9)..(140): NCBI GI: 85092976 Blast Desc: NCU02419 [Neurospora crassa OR74A] gi|28921045|gb|EAA30365.1| conserved [Neurospora crassa OR74A]
  misc_feature (29)..(138): NCBI GI: 39961719 Blast Desc: MGG_09556 [Magnaporthe grisea 70-15] gi|145011059|gb|EDJ95715.1| MGG_09556 [Magnaporthe grisea 70-15]
  misc_feature (29)..(138): NCBI GI: 156050765 Blast Desc: SS1G_07970 [Sclerotinia sclerotiorum 1980] gi|154692370|gb|EDN92108.1| SS1G_07970 [Sclerotinia sclerotiorum 1980]
  misc_feature (21)..(144): NCBI GI: 189091798 Blast Desc: [Podospora anserina] gi|27803009|emb|CAD60712.1| protein product [Podospora anserina] gi|188219252|emb|CAP49232.1| protein product [Podospora anserina]
  misc_feature (29)..(138): NCBI GI: 154290378 Blast Desc: BC1G_15743 [Botryotinia fuckeliana B05.10] gi|150847765|gb|EDN22958.1| BC1G_15743 [Botryotinia fuckeliana B05.10]
  misc_feature: Useful for introducing or modulating the production of volatile compounds
MAFRSRLSSAQIAAGMKLGPQELSQLAGKELHGIVVSAGLMDKTVKVKLGGQRYEPRVQKWFKAPHYKLVHDPRNSLRKGDVVAIQSSWRESQHVRHVVKHIIAPYGQPHRPGPPVPTLEERVAELTAKRQQKDDRRALRRSADLALQDASHPAASP

SEQ ID NO: 39844 - DNA, 11867 bp, Muscodor strobelii
  misc_feature: SGI EST ID NO. CUFF.96886.0
  misc_feature: Variant of the nucleotide sequence at SEQ ID NO 39842
gggaccttcaagtttgaactttgaggagcctcaaacatatctaacgtgacagaggcgacattacgaagacacagcccacaatccacgcaaccacaactcatatccatctcagcacagacagctcacatccagagcgcatctccgcgtcacattcacgatggcctttaggtcgcggctctcgtcggcgcagatcgcggcgggcatgaagctgggcccccaggagctctcgcagctggccggcaaggagctgcacggcatcgtcgtctccgcgggcctgatggacaagacggtcaaggtcaagctgggcggccagcggtacgagcccagagtccagaagtggttcaaggcgccccactacaagctggtccacgacccgcgcaactccctgcgcaagggcgacgtcgtcgccatccagtcctcctggcgcgagtctcagcacgtccgccacgtcgtcaagcacatcatcgccccctacggccagccccatcgaccagggccccccgtccccaccctcgaggaacgcgtcgccgagctcaccgccaagaggcagcagaaggacgaccgcagggccctgaggcggtccgccgaccttgccctgcaggacgcgagccaccccgctgcatcgccatgacgaaaggccgattcaggaaacccttacccgagagagacatacatacgcagaacgcgaactagactgatgggaggcaactatgacgccattgtgtcctgctgcagcgagcagacttggaaggcgaaagagggtacttcgatatgcaagccgacacaacactgcatatgcacgaggcatctggcctcagtcgcgtgtcgccgtgggtgcatgggttggcggagggtatacgatgcagcggctccgtcatccaggattgtatttgtatgtatatgtatatgtatgtgtatatatgtcagtcatgtaatactgctcatttacagcaccggctggctggtcatgagaccgcactgtccataactccttgtctggacgtgcctcagccacggccacatccatcacagtcacccaaatctttccaagcagatcccgtagccttaataagctattacttatcctatccaccacgttctccaaactgcctcgcccagtcctcgtactccttaagcccttcttggctcacactgggtcggatggtacgaaggctggcccggaagtcttccagttcgatcgctcggatctggtccatagtcatgtgcagtacagcttcgccgagcgagcgaagcgggcccatggccgcgtctttggccagcgccgtgatgtcagacccagagaagcctgcaggccccaagtcagcgctcggcctgtaaacagatggtctgtttcccggtggaagaagggactggcattgtacgtacctgcggtcaaatcgaccagctccgtgatatcggcatctgtaaggctgtgtttttgctggccaagcagcgtcttcagctgcgtgcttctcgtttccggctcaggcagtggaatgtattgcctccgtacgaaacggcgacgggctgcctcgtcgatcgcccacggcagattggtagccgcaagcacaagcacccggctcgggtcaccgccgtcttttgcgcttccggggctgtcgcgacccgctgcggctcgttgcagatcactccactggatcaggaattccgttttgagccgccgcgtggcctcgtgctccccagagcctgacctttgcgataacagagaatcaatctcgtcgacaaagatgatactcggcgccatgaccttggaaagcgcaaagagagcgcgcaccagcttctctgattcgcctaggtacttacttgtcaggctactggccgagatcgagaaaaaggtagacttcgattccgtggcgacggctcgagccagcatcgtcttcccggtgcccggtggcccaaacaaaagcatgcctcttgctggttcccgtagacccatgaaaagatccggtcgcaggaacggatagaccaccgcttcccgaagagcattcttggcgatgtccagaccggctacatccgcccagtgcacctcatcaccttgcacaacaatctcgttaaatatggctttcgccgcttcttcatcaacgcccggggggaggtttctcaacatctttttctttttcttttcccacatacttttggctaacgtctcctcctcgtcttctgtgcttccgaccgagcgtgtttctggatcagtaggccccggcgacgccttgtttttgccctttggcttcgaagaacgccaagtatctgctcctcctccctcgatagatgaggtggaatcaccgtcagacccgagctttctacgctgccaactatatgagttcctctcattacttgtgtcctctctgcttgtagaagcattctggtctgcatttcccgccttgaacacgtgatctgagggcgcagagcttgagccattacgacccacggattcgcgggtaggtcgtgtgtcccgcgacgatagagctcgccgttttgttaacgtgtttggggctgatatcgctttaatgttcagcgctccaagggcactcgatgccgctcccagtgcaagtgaggatggcctactaccggtgtaatcccccgacacacgggctgaaggctcctgatgtaatggagatgttgagtctgggctttttggtggctcggcagactgtacaagcctcctcgtgtggctatcccaatgactgggcaatgcggacgagctattcggaggttgtctacgagggagtcgcggagtctggagcggtcgccattccggcgtgctcgatgaagactggtgctgttcagcgatagaacccttgtccggaagtgttttagaatgcagactagtccaagccaaagtagctgcttcattggcaccgggaccatcgtttggcttggagggcgtcttccggcgcacgttggccctgtcagacttgcccgagcgcagcgtggttcgcatggtgcgcctatcggggctgggtgattttatcgcatccttgggagggataggtgagctatagctaggtaaaggaggcggccgagcagaggacgaagcgtcagggtgttcgagagagctgcgagcgccagcaaccgctcgttcagacgatctgctcggggctagagaaggacgttgcggtcggggtgaactcgacagttccgggtacgtgatggcgggtatggttccgtctccgatccatcctttgttgggtgtgtctggataggctggaagatcatcagggcggtcgctctcggccgctgccgagccgtgcgtgggctgctgggctgcgagctcctgtcgcgagatgcggagggcctggaggagatcgatcctctctttgcactgtatctccagctctctcaagctctcgatcagggctcgctcggtctcggatttgggcggctggtttctattgcctgtgccgacttggatttgactgagggcgttcctccagcacgatatcgcctctctctcgtcgcccttgcaagcgaggcgagttagtcgtgtgaagattgcgaggaggggaagtatgaactacttgtatatacctgactctcatagtacacggcggtcgagcatttcaagtaggtctcatcgtaggttttttgcagagtggacgtcctgccagaccacatgatgactcccaagcgataggttctggcgcatcgacgtgtttcgtaagtacatgtgcggctactatctcatgcatccacgatgtgtcctgatcggcgtgtctactgtgtggcaccggctggcggaactggcggcggcactggtggcggagtttgcgatgttgggaggcagcaagacccgtagatagcagtgaggcgggtgcgatggccggtttgactaggcgacgcagtgccagcctccaagaaattggacaggcgtagactcagagtagactgatgcaatgtcacgatacgtcacgtcacgtagggagagaactgcctgcggtggtggcccaaggtcgcggtcgacgcctttaggtctgaaaatggtacaaagatgttgccaagatgcaccatcatgaatgctgtcaaggctgtgacgtcgtgacctatccgccagcctccaaccccggctcacctgccctgggtacatgtatgtttgtactagcacatcccccgcgtggtggggtggcttgtctcgcctacctggaatgcatgggtatccgacgttcgaagcacatgctttaggtacatgtaggtattgttccggttgaagataaggctcgacgtttgacactttacattctacatatgtacataatatatctcgctgttcaactggatgtctcatatatacacctacggcttaacactatatattcaacagtagcattaccccttccggaattcttcgtcaccgtcttcatcttcatctcggggtaactggatgcccatcatgcccagcatgtttcctgccggacccgccattccggcctggcctttgaagctttccaacagattcttggccagattgtaatcgatgtccacttcgtcggagatgctctcctcttcctcctcccgtccaacgtccaatgcctttgacgtctctggctttgcatccagctttaaagccccgagacccttcaattccgcttccatttgtgctgctagctgcctaatctcatcctcttcgttggcttcttcttctgtcgtcccagaatcagcgctcttcgtcttgccccctacggtgtcgttggcagacatcgtcgtgctctcggctggcaggcccatcatttctctcatcatcctgttaaactgatcttcatcgaagctgacggctttgtcttcgtcttcgctgctgtcttcctcatcgtctgaggtgtcgttgtcttcgtccatatcgtctaattcggccccctctaagcctgctgtttcgtcgttcaggaattcttcaaatcgggacacgattcttcgcaggtcagcttgagtcttcttgtcgccgaatgcaccgtcttcgactcttttcttagcttttttgccttccagttcgttttcgaagtcctcaaaatcgatattaagccatccgtcgtcatcttctctagtaacttcgggccagtcggcgatctctttgtcagaaggtaacgcctcgtggccgtcttcctctacatcctcgagaagaatagcaaattcccgtgccagtctgttgttgcctttcttgtcagcactgagagcgagcatctcaaatccaatcgtgactttcatgcctaactcaaggcgcacctcgatgttacgttccggctccggcaccgaagctttgtcgtcttcctcgcccgatttcaccagagagctccaagacggcggtggattgaaatgttgtgacctgacttgtgcgaataataacttggtaaacttgacactaacggtgactaagtcaataggtgggaaatgtagatcaggagttgtaccaagaataggcctcaaggccgtggggtcccgaagatagaaagcttccacagcaggggctattgcagcaggttgctcatgcaaaatgtacgctactttcctgggcaaagtaactaacgctcggtggatacaggatttgatttgatcagggtacttctccagccggtaaaaggcttcagcttcgatgaggggggaatgcaaaacggaagatgcttgatctttggcgtaatgaatagcttcagccaaggtgagaggacgcttgacgcccgcactggcaatcaaaggcagaaggtgcagaccccctcgatatatccaggcgcgatttgcatcaatctcgggactgagccacgttgggagaacgtttgcagcctctacaaggagaaactctccaccgccgtcgaatacccggacccataggcctgggaagtcgatggtcaactgtcgaagcaagtagacaatcagccactcgtcctcaatggaatcgccatagtcggtcatgccatggagatagaccaggccgtgttctcttcgaatttggagctggaaggagtccctctgccagatgtagtctctggtggtagtggcgcacaattggactgcggctttgcggaccctttcgaggctggctagtaagtcacggggctctaggcggctatccagtatgaatagcatatattccacacagctatccggcagatgtcttggaccgccgaacccctgttggaagagctccgctgccgattgagactccatgacatagatcgagaaattggagacaactaggaaagggaagatttaaaagccgggaatctttgctctggtcaatatgataatcagaactgagctaatgccagggtgacaaaaatagccaatgttgagaatgcgttcggaacaggctgtagtgtgaaagcggagtcgttataagtttgacaatgtctctctgtacttggtggcgaaatagtcaaatcggtgatatatggagtaatacaaaaaggtcagtcttgtatttacgcatccgtgtctcgcgcaagagcacgggtgctgccactttgctaccgcgctactgtttcgccagagatgctgactgctgaaggttagaggattttacagctcttcgatgttgcggtgacatggcgggggcggggctgcaagctacctcgtaggcaaaccctgggctttggtacattatgtatggagcctgcgactacctatcttggacgcgatagtgggaaaccacttcgcccgcgtcgcgtgtggcagccgtctccagcgcgtttgttcgtgccgcctcatcttacaagcattcgtggtataatgctatggtagatgccgtcgctgctaacagttaattaagcctctaatccttcattgcgactttggatgctcctcgtaagtacatgtattgcacagctgcattgtcatccaaacaaattgtgcagacggtgtcggcctagacgtgtttcaacaccctcctggaaggtgtgaggtagctacatcgacttccgcctagcctgcggcggcaggagcagcgacatacttaatagagctacgaacgcaggcgcttgcctcccataatgccagaagctgcggaccgcatataaggtagtcaccacctcactaccatttttctgtcctcggctggagagccatcttccgcctccacatccacgcgacatcgtccatcaacatgccatccgcctcgtcttctaagcgttcgcgccgtacggcctttgctgacgacgatgatgctgacgagtacaccgtcacccaatctgccacgtccaacctgcgaggcgactccgatcgcaagaaggctcgactctcagcggcttcgcgcaagcatcgccgtgcggccaaccccgacgaagacgagcccatgcctgatcccgagcgagagcccactccgcctcccgccacccagtacgagctcgccagagaccagggcttcaaacatctcgaccacaccgaagaggacgaccaacgcgccacccagcgcctcagggaccgtcccaccatcataggcgacaaccatgccgcccagaacgccattatcgaggagatcacctgcatcaacttcatgtgccacaccaatctaagggtccagctggggcccctgctcaacttcgtcgtaggtgagaacggcagcggcaagagcgccgtcctgacggccattacactctgcctcggcggcaaggccagcgccaccaaccgcggagggagcttgaggagctttgtcaaagagggtcaggaccatgccagcctcgtcatcaagctcaagaaccagggcgaggacgcctacaagcccgatgtgtatggtgactccattacctgcgagcgctggttcaccaagtctggtggtagtggtttcaagctcaaatccactgccgggagggtcatctccacgaagaaggccgatgtcgaggacatcgttgagtggtactgtctccaggttgacaaccctctcaatgttttgtcccaggacaatgctaggcaattcctcaacgcagcaactccagctatgaagtacggctattttatcaaaggcacgcagctcgagcagcttgacgacgattataagcaatacatgcaatctctcgacgaccacgagtcgaaagtggttgagctggacgagaacctgacctatcttaagcaggaattcgagaaagcggtcaagcttcgggatgctgcaagccgagctacggaaatgcgccagcgtggtcaggtatacaaaaatcaactagcctgggctcaagtcaaagagcaggaagacatcctgaagcagaaagagaatgctatcttggctgctcaagaggaaattgatcgtgcgggggcggcaatcactcagaccacccaaaacctcgcgcatatcgatgacaaaatacagcatgcaagagccgccctggaatcggcacaacaagagaagggccaggcagatgagcgaaaacaagaggcgagagatcgtttcgatcaatgcaaggcagagctcgtcctattgcaaaccgaggaaagggatctgaagggcaaccttgatcaagccgccgctactgtcgaacaactggagggttcgatacgcgctgaggaaagcctcctccaggagaaaagcggaggagtcgtggcagagaagcagcgagagcttgaccaagccaaggaaacagaagaacggatccgacaatctattcaggaacacggcgatcgcctcaaaactcttcaaaccgaacgtgaaaaggccgattttgacgccaaagagccagaaactatgcttaagcgtaagagaaaggaggtacaggatgccgaagcagcattacaagcatcgcaacagaatcgaacagatccgttagacgggtttgggaggccaatgcatgagctcctgagactcatcaacaatgacagaaatttcgcgcaaaagccaataggaccattggggatacacatgcagctcaccaggcctcagtggatgccagtgtttgaaaaacagatgggaggagcgcttaacggtttcattgtccaaagcaagtcggaccaagtgagactcatgggtctcatggacagagtgaggatctcgaattcgcccgtgttcattggaaacccatccattcgacaacttcgagaacctgatgagaaatatgacaacatgttgagggttcttgaatttgacgatcagcgcgtaagagaccacctgatcattcagcaaaagatagaacagatccttcttatagaaagcagagtggaggcagaagaagtcatgtttcaccctgatgggccgccagaaaactcgtctgcatgcttggctctgaatgatcgacaaaagggtcatggtatgcgcatcacgaacaatcgcggtaatctaagcacgaatcctgtttctcccaacctcgctcaacgaccgcgtatgaagaccgatgatggtcgacaaatagagttctaccaaaaccttgtagcgcaactacaagaagaactcaatgacgcggagaagtcccgaaggatggctgaccaaggtattcagcgggtcacccaggccatcagtcaacataagaaacagggagagaggttaagttcgcaactcaagaatgcgagagtcggtattagacggatcgaagaggagctcgattctttcgacggcagcgacgatcgacttcaagggttaaaagaccaactgagagacgcccaagaaaggcaggatcaatgggggaaccagtttggagaagtggcggtgcgaaagaaggagaagaatgtcgagagcgaggcgctggcgaacgaggtcaggagtttcaaagtggaacttagggaccacgaggctcatgtgaacaaagccacggacaaggtgaagcgatacgaagacacacgccgtattgctttgagcgagaaaaacgcagcgcacgaaacagaagcgatggccaaagttgcgaaaacacaggccgaggcttctcgtgagcgccaggctacatacgtggccgagtacaacgagcaggccagccgtgttgcacccgagagagcatatatccccgaaggtgaaaacttccagaccatcgagcagaagtataatcagattcgcacggatttgcaaaggctgaggggccagatgggcgcttcggaagaagagattaacagccgagctgtcaaggcgacgcaggagtatcgcgatgccaaagccagctttaagaacgtacagtcgggcatggatctcatgaagaagtcgttaatggatcgactggccaagttccgagaattccagaggcacgtctcggcacaagcgcggtgcaattttggctatctcctgagcgagcgtggtttccgaggccaacttcttctcgatcaccgagccaagaaactcgaggtcatcgtcgagccggacaagacacgagagaacggaaaaggaagaaacacgaagacgctgtctggcggtgagaagtcattctcgtccatttgtctgctacttgccatttgggacgccatgggttcaccgctacggtgtctcgacgaattcgacgtcttcatggacaatgtcaatcgggccattagcacgaatatgctgatcgctgcggcccgtcggtccgtaggcaaacagttcatactcatcacgcccaacgccatcgagggacgcgcaaatctagataaggatgtcaagatcattaggcttacggatcctcggcaacaacgcattgataatatgatataatgactgctggggcattacgcgtccggttggttgaggtgctgcttgcttgacaataacgagagctgagctgataatgggcggtatggcatgggggatacttgggagtttggaggcgacggttcggaggatcgcttgatctgggtgttcaggcatgctcttcacattgttgctgcatctttgttttcgagtggactaggtcggtcttcatggcgtgcaagtctgggtgttgttttactagaatccatggtttcaaagccgttccggtgcatcaaaagcaaggttgtcaaacttcaggcaagataagccttgcaattgactcgttaagtctccctcattgtacccggccaaacttaaggcaccaagggtcttccttcttgtttctctgtacatggtgttacattgctttggcacatatagtacattgtaatttacagacgaagcgctcgccgcggatgacaggcccttccatctggagctacgacggtgcggacaaaggcctcatattctcacgcctttgctgcgcagcacgttgacagcagcggaggcggtgaagccagcccactgggcgacgctctccgctgcgcccgagagggtgccagcctgggcaaagcggcgttggagaaaggcgcgggtgtcttggaagcccggcgaggggtcattggtcatgaacagctccgaggacgtgtatatcatggacaggccggctcgtttcgtgtaccacgtggggtcgacggagacatcgccggccaggtggtgtatctcgtcggcgaggagggcgagctcgtggagcgaggaggggacgtgggcgggttgggccatgatggcgagagcctagggccagtcagcaagcggcgtcggcgtgcgggtggggagcgtgtcgcacctcctgccagcgatggttcacgtccctgttggccagcaacctgtcccaggtcaggcgctcgacgcgggcgggcaccatgtcgggcgtgacggggtcggtggcggggaagagagtgctggtgcgcggggcgagagcttcgcgctgggtgacgaggtgccagcggatgaggctgaagggcccgtcgggcagcagggtggtgctgatgtcgaggtagccggcgtcgcgggcgccgagcgacagggcgtggtgggagaagccgtgctcgggcacgtggcggtaggcggcggagagaatggcctgctcggcatcgttgaagtcgccgtcgcccacgcccacgcccggcggcgaggggtggtcgtacgaatggtagcttcgcatgcgccagcccgctgcccg

SEQ ID NO: 39845 - DNA, 2400 bp, Muscodor strobelii
  misc_feature: SGI cDNA ID NO. 573878
  misc_feature: Reduced expression when VOC is produced
  misc_feature: Encodes the peptide sequence at SEQ ID NO 39846
atgtggtctggcaggacgtccactctgcaaaaaacctacgatgagacctacttgaaatgctcgaccgccgtgtactatgagagtcagggcgacgagagagaggcgatatcgtgctggaggaacgccctcagtcaaatccaagtcggcacaggcaatagaaaccagccgcccaaatccgagaccgagcgagccctgatcgagagcttgagagagctggagatacagtgcaaagagaggatcgatctcctccaggccctccgcatctcgcgacaggagctcgcagcccagcagcccacgcacggctcggcagcggccgagagcgaccgccctgatgatcttccagcctatccagacacacccaacaaaggatggatcggagacggaaccatacccgccatcacgtacccggaactgtcgagttcaccccgaccgcaacgtccttctctagccccgagcagatcgtctgaacgagcggttgctggcgctcgcagctctctcgaacaccctgacgcttcgtcctctgctcggccgcctcctttacctagctatagctcacctatccctcccaaggatgcgataaaatcacccagccccgataggcgcaccatgcgaaccacgctgcgctcgggcaagtctgacagggccaacgtgcgccggaagacgccctccaagccaaacgatggtcccggtgccaatgaagcagctactttggcttggactagtctgcattctaaaacacttccggacaagggttctatcgctgaacagcaccagtcttcatcgagcacgccggaatggcgaccgctccagactccgcgactccctcgtagacaacctccgaatagctcgtccgcattgcccagtcattgggatagccacacgaggaggcttgtacagtctgccgagccaccaaaaagcccagactcaacatctccattacatcaggagccttcagcccgtgtgtcgggggattacaccggtagtaggccatcctcacttgcactgggagcggcatcgagtgcccttggagcgctgaacattaaagcgatatcagccccaaacacgttaacaaaacggcgagctctatcgtcgcgggacacacgacctacccgcgaatccgtgggtcgtaatggctcaagctctgcgccctcagatcacgtgttcaaggcgggaaatgcagaccagaatgcttctacaagcagagaggacacaagtaatgagaggaactcatatagttggcagcgtagaaagctcgggtctgacggtgattccacctcatctatcgagggaggaggagcagatacttggcgttcttcgaagccaaagggcaaaaacaaggcgtcgccggggcctactgatccagaaacacgctcggtcggaagcacagaagacgaggaggagacgttagccaaaagtatgtgggaaaagaaaaagaaaaagatgttgagaaacctccccccgggcgttgatgaagaagcggcgaaagccatatttaacgagattgttgtgcaaggtgatgaggtgcactgggcggatgtagccggtctggacatcgccaagaatgctcttcgggaagcggtggtctatccgttcctgcgaccggatcttttcatgggtctacgggaaccagcaagaggcatgcttttgtttgggccaccgggcaccgggaagacgatgctggctcgagccgtcgccacggaatcgaagtctacctttttctcgatctcggccagtagcctgacaagtaagtacctaggcgaatcagagaagctggtgcgcgctctctttgcgctttccaaggtcatggcgccgagtatcatctttgtcgacgagattgattctctgttatcgcaaaggtcaggctctggggagcacgaggccacgcggcggctcaaaacggaattcctgatccagtggagtgatctgcaacgagccgcagcgggtcgcgacagccccggaagcgcaaaagacggcggtgacccgagccgggtgcttgtgcttgcggctaccaatctgccgtgggcgatcgacgaggcagcccgtcgccgtttcgtacggaggcaatacattccactgcctgagccggaaacgagaagcacgcagctgaagacgctgcttggccagcaaaaacacagccttacagatgccgatatcacggagctggtcgatttgaccgcaggcttctctgggtctgacatcacggcgctggccaaagacgcggccatgggcccgcttcgctcgctcggcgaagctgtactgcacatgactatggaccagatccgagcgatcgaactggaagacttccgggccagccttcgtaccatccgacccagtgtgagccaagaagggcttaaggagtacgaggactgggcgaggcagtttggagaacgtggtggatag

SEQ ID NO: 39846 - protein, 799 aa, Muscodor strobelii
  misc_feature: SGI Peptide ID NO. 573878
  misc_feature (546)..(746): Pfam Id: PF00004 Pfam Desc: ATPase family associated with various cellular activities (AAA)
  misc_feature (750)..(795): Pfam Id: PF09336 Pfam Desc: Vps4 C terminal oligomerisation domain
  misc_feature (763)..(795): Pfam Id: PF09336 Pfam Desc: Vps4 C terminal oligomerisation domain
  misc_feature (7)..(799): NCBI GI: 46136671 Blast Desc: FG09851.1 [Gibberella zeae PH-1]
  misc_feature (36)..(799): NCBI GI: 261361145 Blast Desc: SAP1 [Verticillium albo-atrum VaMs.102]
  misc_feature (7)..(799): NCBI GI: 145236695 Blast Desc: An06g01740 [Aspergillus niger] gi|134075456|emb|CAK48017.1| protein product [Aspergillus niger]
  misc_feature (7)..(798): NCBI GI: 240105191 Blast Desc: ATPase, AAA family protein [Coccidioides posadasii C735 delta SOWgp]
  misc_feature (461)..(799): NCBI GI: 116179646 Blast Desc: CHGG_00451 [Chaetomium globosum CBS 148.51] gi|88184748|gb|EAQ92216.1| CHGG_00451 [Chaetomium globosum CBS 148.51]
  misc_feature (396)..(799): NCBI GI: 154290380 Blast Desc: AAA family ATPase [Botryotinia fuckeliana B05.10] gi|150847766|gb|EDN22959.1| AAA family ATPase [Botryotinia fuckeliana B05.10]
  misc_feature (461)..(799): NCBI GI: 189091796 Blast Desc: [Podospora anserina] gi|188219251|emb|CAP49231.1| protein product [Podospora anserina]
  misc_feature (461)..(799): NCBI GI: 27803008 Blast Desc: protein product [Podospora anserina]
  misc_feature (452)..(799): NCBI GI: 225684013 Blast Desc: katanin p60 ATPase-containing subunit [Paracoccidioides brasiliensis Pb03]
  misc_feature (452)..(799): NCBI GI: 226293403 Blast Desc: conserved [Paracoccidioides brasiliensis Pb18]
  misc_feature: Useful for introducing or modulating the production of volatile compounds
MWSGRTSTLQKTYDETYLKCSTAVYYESQGDEREAISCWRNALSQIQVGTGNRNQPPKSETERALIESLRELEIQCKERIDLLQALRISRQELAAQQPTHGSAAAESDRPDDLPAYPDTPNKGWIGDGTIPAITYPELSSSPRPQRPSLAPSRSSERAVAGARSSLEHPDASSSARPPPLPSYSSPIPPKDAIKSPSPDRRTMRTTLRSGKSDRANVRRKTPSKPNDGPGANEAATLAWTSLHSKTLPDKGSIAEQHQSSSSTPEWRPLQTPRLPRRQPPNSSSALPSHWDSHTRRLVQSAEPPKSPDSTSPLHQEPSARVSGDYTGSRPSSLALGAASSALGALNIKAISAPNTLTKRRALSSRDTRPTRESVGRNGSSSAPSDHVFKAGNADQNASTSREDTSNERNSYSWQRRKLGSDGDSTSSIEGGGADTWRSSKPKGKNKASPGPTDPETRSVGSTEDEEETLAKSMWEKKKKKMLRNLPPGVDEEAAKAIFNEIVVQGDEVHWADVAGLDIAKNALREAVVYPFLRPDLFMGLREPARGMLLFGPPGTGKTMLARAVATESKSTFFSISASSLTSKYLGESEKLVRALFALSKVMAPSIIFVDEIDSLLSQRSGSGEHEATRRLKTEFLIQWSDLQRAAAGRDSPGSAKDGGDPSRVLVLAATNLPWAIDEAARRRFVRRQYIPLPEPETRSTQLKTLLGQQKHSLTDADITELVDLTAGFSGSDITALAKDAAMGPLRSLGEAVLHMTMDQIRAIELEDFRASLRTIRPSVSQEGLKEYEDWARQFGERGG

SEQ ID NO: 39847 - DNA, 11942 bp, Muscodor strobelii
  misc_feature: SGI EST ID NO. CUFF.96887.1
  misc_feature: Variant of the nucleotide sequence at SEQ ID NO 39845
cgggcagcgggctggcgcatgcgaagctaccattcgtacgaccacccctcgccgccgggcgtgggcgtgggcgacggcgacttcaacgatgccgagcaggccattctctccgccgcctaccgccacgtgcccgagcacggcttctcccaccacgccctgtcgctcggcgcccgcgacgccggctacctcgacatcagcaccaccctgctgcccgacgggcccttcagcctcatccgctggcacctcgtcacccagcgcgaagctctcgccccgcgcaccagcactctcttccccgccaccgaccccgtcacgcccgacatggtgcccgcccgcgtcgagcgcctgacctgggacaggttgctggccaacagggacgtgaaccatcgctggcaggaggctctcgccatcatggcccaacccgcccacgtcccctcctcgctccacgagctcgccctcctcgccgacgagatacaccacctggccggcgatgtctccgtcgaccccacgtggtacacgaaacgagccggcctgtccatgatatacacgtcctcggagctgttcatgaccaatgacccctcgccgggcttccaagacacccgcgcctttctccaacgccgctttgcccaggctggcaccctctcgggcgcagcggagagcgtcgcccagtgggctggcttcaccgcctccgctgctgtcaacgtgctgcgcagcaaaggcgtgagaatatgaggcctttgtccgcaccgtcgtagctccagatggaagggcctgtcatccgcggcgagcgcttcgtctgtaaattacaatgtactatatgtgccaaagcaatgtaacaccatgtacagagaaacaagaaggaagacccttggtgccttaagtttggccgggtacaatgagggagacttaacgagtcaattgcaaggcttatcttgcctgaagtttgacaaccttgcttttgatgcaccggaacggctttgaaaccatggattctagtaaaacaacacccagacttgcacgccatgaagaccgacctagtccactcgaaaacaaagatgcagcaacaatgtgaagagcatgcctgaacacccagatcaagcgatcctccgaaccgtcgcctccaaactcccaagtatcccccatgccataccgcccattatcagctcagctctcgttattgtcaagcaagcagcacctcaaccaaccggacgcgtaatgccccagcagtcattatatcatattatcaatgcgttgttgccgaggatccgtaagcctgtttacctgtcagaaaagatttcatgctagtgctttgatatatagtgacttgtcccatacctaatgatcttgacatccttatctagatttgcgcgtccctcgatggcgttgggcgtgatgagtatgaactgtttgcctacggaccgacgggccgcagcgatctgtccgcctcgttagtcacagaacctccacacaccggcactagggagggccatgggcgacttaccagcatattcgtgctaatggcccgattgacattgtccatgaagacgtcgaattcgtcgagacaccgtagcggtgaacccatggcgtcccaaatggcaagtagcagacaaatggacgagaatgacttctcaccgccagacagcgtcttcgtgtttcttccttttccgttctctcgtgtcttgtccggctcgacgatgacctcgagtttcttggctcggtgatcgagaagaagttggcctcggaaaccacgctcgctcaggagatagccaaaattgcaccgcgcttgtgccgagacgtgcctctggaattctcggaacttggccagtcgatccattaacgacttcttcatgagatccatgcccgactgtacgttcttaaagctggctttggcatcgcgatactcctgcgtcgccttgacagctcggctgttaatctcttcttccgaagcgcccatctggcccctcagcctttgcaaatccgtgcgaatctgattatacttctgctcgatggtctggaagttttcaccttcggggatatatgctctctcgggtgcaacacggctggcctgctcgttgtactcggccacgtatgtagcctggcgctcacgagaagcctcggcctgtgttttcgcaactttggccatcgcttctgtttcgtgcgctgcgtttttctcgctcaaagcaatacggcgtgtgtcttcgtatcgcttcaccttgtccgtggctttgttcacatgagcctcgtggtccctaagttccactttgaaactcctgacctcgttcgccagcgcctcgctctcgacattcttctccttctttcgcaccgccacttctccaaactggttcccccattgatcctgcctttcttgggcgtctctcagttggtcttttaacccttgaagtcgatcgtcgctgccgtcgaaagaatcgagctcctcttcgatccgtctaataccgactctcgcattcttgagttgcgaacttaacctctctccctgtttcttatgttgactgatggcctgggtgacccgctgaataccttggtcagccatccttcgggacttctccgcgtcattgagttcttcttgtagttgcgctacaaggttttggtagaactctatttgtcgaccatcatcggtcttcatacgcggtcgttgagcgaggttgggagaaacaggattcgtgcttagattaccgcgattgttcgtgatgcgcataccatgacccttttgtcgatcattcagagccaagcatgcagacgagttttctggcggcccatcagggtgaaacatgacttcttctgcctccactctgctttctataagaaggatctgttctatcttttgctgaatgatcaggtggtctcttacgcgctgatcgtcaaattcaagaaccctcaacatgttgtcatatttctcatcaggttctcgaagttgtcgaatggatgggtttccaatgaacacgggcgaattcgagatcctcactctgtccatgagacccatgagtctcacttggtccgacttgctttggacaatgaaaccgttaagcgctcctcccatctgtttttcaaacactggcatccactgaggcctggtgagctgcatgtgtatccccaatggtcctattggcttttgcgcgaaatttctgtcattgttgatgagtctcaggagctcatgcattggcctcccaaacccgtctaacggatctgttcgattctgttgcgatgcttgtaatgctgcttcggcatcctgtacctcctttctcttacgcttaagcatagtttctggctctttggcgtcaaaatcggccttttcacgttcggtttgaagagttttgaggcgatcgccgtgttcctgaatagattgtcggatccgttcttctgtttccttggcttggtcaagctctcgctgcttctctgccacgactcctccgcttttctcctggaggaggctttcctcagcgcgtatcgaaccctccagttgttcgacagtagcggcggcttgatcaaggttgcccttcagatccctttcctcggtttgcaataggacgagctctgccttgcattgatcgaaacgatctctcgcctcttgttttcgctcatctgcctggcccttctcttgttgtgccgattccagggcggctcttgcatgctgtattttgtcatcgatatgcgcgaggttttgggtggtctgagtgattgccgcccccgcacgatcaatttcctcttgagcagccaagatagcattctctttctgcttcaggatgtcttcctgctctttgacttgagcccaggctagttgatttttgtatacctgaccacgctggcgcatttccgtagctcggcttgcagcatcccgaagcttgaccgctttctcgaattcctgcttaagataggtcaggttctcgtccagctcaaccactttcgactcgtggtcgtcgagagattgcatgtattgcttataatcgtcgtcaagctgctcgagctgcgtgcctttgataaaatagccgtacttcatagctggagttgctgcgttgaggaattgcctagcattgtcctgggacaaaacattgagagggttgtcaacctggagacagtaccactcaacgatgtcctcgacatcggccttcttcgtggagatgaccctcccggcagtggatttgagcttgaaaccactaccaccagacttggtgaaccagcgctcgcaggtaatggagtcaccatacacatcgggcttgtaggcgtcctcgccctggttcttgagcttgatgacgaggctggcatggtcctgaccctctttgacaaagctcctcaagctccctccgcggttggtggcgctggccttgccgccgaggcagagtgtaatggccgtcaggacggcgctcttgccgctgccgttctcacctacgacgaagttgagcaggggccccagctggacccttagattggtgtggcacatgaagttgatgcaggtgatctcctcgataatggcgttctgggcggcatggttgtcgcctatgatggtgggacggtccctgaggcgctgggtggcgcgttggtcgtcctcttcggtgtggtcgagatgtttgaagccctggtctctggcgagctcgtactgggtggcgggaggcggagtgggctctcgctcgggatcaggcatgggctcgtcttcgtcggggttggccgcacggcgatgcttgcgcgaagccgctgagagtcgagccttcttgcgatccttgtatgactttgacgttaggccatgggcaatgaggtgcggaaatatggggatgtggaggtgtgaaggtgtgcactcacggagtcgcctcgcaggttggacgtggcagattgggtgacggtgtactcgtcagcatcatcgtcgtcagcaaaggccgtacggcgcgaacgcttagaagacgaggcggatggcatgttgatggacgatgtcgcgtggatgtggaggcggaagatggctctccagccgaggacagaaaaatggtagtgaggtggtgactaccttatatgcggtccgcagcttctggcattatgggaggcaagcgcctgcgttcgtagctctattaagtatgtcgctgctcctgccgccgcaggctaggcggaagtcgatgtagctacctcacaccttccaggagggtgttgaaacacgtctaggccgacaccgtctgcacaatttgtttggatgacaatgcagctgtgcaatacatgtacttacgaggagcatccaaagtcgcaatgaaggattagaggcttaattaactgttagcagcgacggcatctaccatagcattataccacgaatgcttgtaagatgaggcggcacgaacaaacgcgctggagacggctgccacacgcgacgcgggcgaagtggtttcccactatcgcgtccaagataggtagtcgcaggctccatacataatgtaccaaagcccagggtttgcctacgaggtagcttgcagccccgcccccgccatgtcaccgcaacatcgaagagctgtaaaatcctctaaccttcagcagtcagcatctctggcgaaacagtagcgcggtagcaaagtggcagcacccgtgctcttgcgcgagacacggatgcgtaaatacaagactgacctttttgtattactccatatatcaccgatttgactatttcgccaccaagtacagagagacattgtcaaacttataacgactccgctttcacactacagcctgttccgaacgcattctcaacattggctatttttgtcaccctggcattagctcagttctgattatcatattgaccagagcaaagattcccggcttttaaatcttccctttcctagttgtctccaatttctcgatctatgtcatggagtctcaatcggcagcggagctcttccaacaggggttcggcggtccaagacatctgccggatagctgtgtggaatatatgctattcatactggatagccgcctagagccccgtgacttactagccagcctcgaaagggtccgcaaagccgcagtccaattgtgcgccactaccaccagagactacatctggcagagggactccttccagctccaaattcgaagagaacacggcctggtctatctccatggcatgaccgactatggcgattccattgaggacgagtggctgattgtctacttgcttcgacagttgaccatcgacttcccaggcctatgggtccgggtattcgacggcggtggagagtttctccttgtagaggctgcaaacgttctcccaacgtggctcagtcccgagattgatgcaaatcgcgcctggatatatcgagggggtctgcaccttctgcctttgattgccagtgcgggcgtcaagcgtcctctcaccttggctgaagctattcattacgccaaagatcaagcatcttccgttttgcattcccccctcatcgaagctgaagccttttaccggctggagaagtaccctgatcaaatcaaatcctgtatccaccgagcgttagttactttgcccaggaaagtagcgtacattttgcatgagcaacctgctgcaatagcccctgctgtggaagctttctatcttcgggaccccacggccttgaggcctattcttggtacaactcctgatctacatttcccacctattgacttagtcaccgttagtgtcaagtttaccaagttattattcgcacaagtcaggtcacaacatttcaatccaccgccgtcttggagctctctggtgaaatcgggcgaggaagacgacaaagcttcggtgccggagccggaacgtaacatcgaggtgcgccttgagttaggcatgaaagtcacgattggatttgagatgctcgctctcagtgctgacaagaaaggcaacaacagactggcacgggaatttgctattcttctcgaggatgtagaggaagacggccacgaggcgttaccttctgacaaagagatcgccgactggcccgaagttactagagaagatgacgacggatggcttaatatcgattttgaggacttcgaaaacgaactggaaggcaaaaaagctaagaaaagagtcgaagacggtgcattcggcgacaagaagactcaagctgacctgcgaagaatcgtgtcccgatttgaagaattcctgaacgacgaaacagcaggcttagagggggccgaattagacgatatggacgaagacaacgacacctcagacgatgaggaagacagcagcgaagacgaagacaaagccgtcagcttcgatgaagatcagtttaacaggatgatgagagaaatgatgggcctgccagccgagagcacgacgatgtctgccaacgacaccgtagggggcaagacgaagagcgctgattctgggacgacagaagaagaagccaacgaagaggatgagattaggcagctagcagcacaaatggaagcggaattgaagggtctcggggctttaaagctggatgcaaagccagagacgtcaaaggcattggacgttggacgggaggaggaagaggagagcatctccgacgaagtggacatcgattacaatctggccaagaatctgttggaaagcttcaaaggccaggccggaatggcgggtccggcaggaaacatgctgggcatgatgggcatccagttaccccgagatgaagatgaagacggtgacgaagaattccggaaggggtaatgctactgttgaatatatagtgttaagccgtaggtgtatatatgagacatccagttgaacagcgagatatattatgtacatatgtagaatgtaaagtgtcaaacgtcgagccttatcttcaaccggaacaatacctacatgtacctaaagcatgtgcttcgaacgtcggatacccatgcattccaggtaggcgagacaagccaccccaccacgcgggggatgtgctagtacaaacatacatgtacccagggcaggtgagccggggttggaggctggcggataggtcacgacgtcacagccttgacagcattcatgatggtgcatcttggcaacatctttgtaccattttcagacctaaaggcgtcgaccgcgaccttgggccaccaccgcaggcagttctctccctacgtgacgtgacgtatcgtgacattgcatcagtctactctgagtctacgcctgtccaatttcttggaggctggcactgcgtcgcctagtcaaaccggccatcgcacccgcctcactgctatctacgggtcttgctgcctcccaacatcgcaaactccgccaccagtgccgccgccagttccgccagccggtgccacacagtagacacgccgatcaggacacatcgtggatgcatgagatagtagccgcacatgtacttacgaaacacgtcgatgcgccagaacctatcgcttgggagtcatcatgtggtctggcaggacgtccactctgcaaaaaacctacgatgagacctacttgaaatgctcgaccgccgtgtactatgagagtcaggtatatacaagtagttcatacttcccctcctcgcaatcttcacacgactaactcgcctcgcttgcaagggcgacgagagagaggcgatatcgtgctggaggaacgccctcagtcaaatccaagtcggcacaggcaatagaaaccagccgcccaaatccgagaccgagcgagccctgatcgagagcttgagagagctggagatacagtgcaaagagaggatcgatctcctccaggccctccgcatctcgcgacaggagctcgcagcccagcagcccacgcacggctcggcagcggccgagagcgaccgccctgatgatcttccagcctatccagacacacccaacaaaggatggatcggagacggaaccatacccgccatcacgtacccggaactgtcgagttcaccccgaccgcaacgtccttctctagccccgagcagatcgtctgaacgagcggttgctggcgctcgcagctctctcgaacaccctgacgcttcgtcctctgctcggccgcctcctttacctagctatagctcacctatccctcccaaggatgcgataaaatcacccagccccgataggcgcaccatgcgaaccacgctgcgctcgggcaagtctgacagggccaacgtgcgccggaagacgccctccaagccaaacgatggtcccggtgccaatgaagcagctactttggcttggactagtctgcattctaaaacacttccggacaagggttctatcgctgaacagcaccagtcttcatcgagcacgccggaatggcgaccgctccagactccgcgactccctcgtagacaacctccgaatagctcgtccgcattgcccagtcattgggatagccacacgaggaggcttgtacagtctgccgagccaccaaaaagcccagactcaacatctccattacatcaggagccttcagcccgtgtgtcgggggattacaccggtagtaggccatcctcacttgcactgggagcggcatcgagtgcccttggagcgctgaacattaaagcgatatcagccccaaacacgttaacaaaacggcgagctctatcgtcgcgggacacacgacctacccgcgaatccgtgggtcgtaatggctcaagctctgcgccctcagatcacgtgttcaaggcgggaaatgcagaccagaatgcttctacaagcagagaggacacaagtaatgagaggaactcatatagttggcagcgtagaaagctcgggtctgacggtgattccacctcatctatcgagggaggaggagcagatacttggcgttcttcgaagccaaagggcaaaaacaaggcgtcgccggggcctactgatccagaaacacgctcggtcggaagcacagaagacgaggaggagacgttagccaaaagtatgtgggaaaagaaaaagaaaaagatgttgagaaacctccccccgggcgttgatgaagaagcggcgaaagccatatttaacgagattgttgtgcaaggtgatgaggtgcactgggcggatgtagccggtctggacatcgccaagaatgctcttcgggaagcggtggtctatccgttcctgcgaccggatcttttcatgggtctacgggaaccagcaagaggcatgcttttgtttgggccaccgggcaccgggaagacgatgctggctcgagccgtcgccacggaatcgaagtctacctttttctcgatctcggccagtagcctgacaagtaagtacctaggcgaatcagagaagctggtgcgcgctctctttgcgctttccaaggtcatggcgccgagtatcatctttgtcgacgagattgattctctgttatcgcaaaggtcaggctctggggagcacgaggccacgcggcggctcaaaacggaattcctgatccagtggagtgatctgcaacgagccgcagcgggtcgcgacagccccggaagcgcaaaagacggcggtgacccgagccgggtgcttgtgcttgcggctaccaatctgccgtgggcgatcgacgaggcagcccgtcgccgtttcgtacggaggcaatacattccactgcctgagccggaaacgagaagcacgcagctgaagacgctgcttggccagcaaaaacacagccttacagatgccgatatcacggagctggtcgatttgaccgcaggcttctctgggtctgacatcacggcgctggccaaagacgcggccatgggcccgcttcgctcgctcggcgaagctgtactgcacatgactatggaccagatccgagcgatcgaactggaagacttccgggccagccttcgtaccatccgacccagtgtgagccaagaagggcttaaggagtacgaggactgggcgaggcagtttggagaacgtggtggataggataagtaatagcttattaaggctacgggatctgcttggaaagatttgggtgactgtgatggatgtggccgtggctgaggcacgtccagacaaggagttatggacagtgcggtctcatgaccagccagccggtgctgtaaatgagcagtattacatgactgacatatatacacatacatatacatatacatacaaatacaatcctggatgacggagccgctgcatcgtataccctccgccaacccatgcacccacggcgacacgcgactgaggccagatgcctcgtgcatatgcagtgttgtgtcggcttgcatatcgaagtaccctctttcgccttccaagtctgctcgctgcagcaggacacaatggcgtcatagttgcctcccatcagtctagttcgcgttctgcgtatgtatgtctctctcgggtaagggtttcctgaatcggcctttcgtcatggcgatgcagcggggtggctcgcgtcctgcagggcaaggtcggcggaccgcctcagggccctgcggtcgtccttctgctgcctcttggcggtgagctcggcgacgcgttcctcgagggtggggacggggggccctggtcgatggggctggccgtagggggcgatgatgtgcttgacgacgtggcggacgtgctgagactcgcgccaggaggactggatggcgacgacgtcgcccttgcgcagggagttgcgcgggtcgtggaccagcttgtagtggggcgccttgaaccacttctggactctgggctcgtaccgctggccgcccagcttgaccttgaccgtcttgtccatcaggcccgcggagacgacgatgccgtgcagctccttgccggccagctgcgagagctcctgggggcccagcttcatgcccgccgcgatctgcgccgacgagagccgcgacctaaaggccatcgtgaatgtgacgcggagatgcgctctggatgtgagctgtctgtgctgagatggatatgagttgtggttgcgtggattgtgggctgtgtcttcgtaatgtcgcctctgtcacgttagatatgtttgaggctcctcaaagttcaaacttgaaggtccc

SEQ ID NO: 39848 - DNA, 846 bp, Muscodor strobelii
  misc_feature: SGI cDNA ID NO. 573879
  misc_feature: Encodes the peptide sequence at SEQ ID NO 39849
atgctcgctctcagtgctgacaagaaaggcaacaacagactggcacgggaatttgctattcttctcgaggatgtagaggaagacggccacgaggcgttaccttctgacaaagagatcgccgactggcccgaagttactagagaagatgacgacggatggcttaatatcgattttgaggacttcgaaaacgaactggaaggcaaaaaagctaagaaaagagtcgaagacggtgcattcggcgacaagaagactcaagctgacctgcgaagaatcgtgtcccgatttgaagaattcctgaacgacgaaacagcaggcttagagggggccgaattagacgatatggacgaagacaacgacacctcagacgatgaggaagacagcagcgaagacgaagacaaagccgtcagcttcgatgaagatcagtttaacaggatgatgagagaaatgatgggcctgccagccgagagcacgacgatgtctgccaacgacaccgtagggggcaagacgaagagcgctgattctgggacgacagaagaagaagccaacgaagaggatgagattaggcagctagcagcacaaatggaagcggaattgaagggtctcggggctttaaagctggatgcaaagccagagacgtcaaaggcattggacgttggacgggaggaggaagaggagagcatctccgacgaagtggacatcgattacaatctggccaagaatctgttggaaagcttcaaaggccaggccggaatggcgggtccggcaggaaacatgctgggcatgatgggcatccagttaccccgagatgaagatgaagacggtgacgaagaattccggaaggggtaa

SEQ ID NO: 39849 - protein, 281 aa, Muscodor strobelii
  misc_feature: SGI Peptide ID NO. 573879
  misc_feature (231)..(269): Pfam Id: PF07093 Pfam Desc: SGT1 protein
  misc_feature (1)..(273): NCBI GI: 256732432 Blast Desc: NECHADRAFT_78625 [Nectria haematococca mpVI 77-13-4]
  misc_feature (1)..(275): NCBI GI: 46136643 Blast Desc: FG09837.1 [Gibberella zeae PH-1]
  misc_feature (13)..(271): NCBI GI: 261361163 Blast Desc: SGT1-like protein [Verticillium albo-atrum VaMs.102]
  misc_feature (9)..(275): NCBI GI: 164427084 Blast Desc: NCU02401 [Neurospora crassa OR74A] gi|157071600|gb|EAA30485.2| conserved [Neurospora crassa OR74A]
  misc_feature (1)..(275): NCBI GI: 39942988 Blast Desc: MGG_03574 [Magnaporthe grisea 70-15] gi|145009857|gb|EDJ94513.1| MGG_03574 [Magnaporthe grisea 70-15]
  misc_feature (4)..(272): NCBI GI: 226281422 Blast Desc: conserved [Paracoccidioides brasiliensis Pb01]
  misc_feature (8)..(274): NCBI GI: 156042386 Blast Desc: SS1G_10990 [Sclerotinia sclerotiorum 1980] gi|154695377|gb|EDN95115.1| SS1G_10990 [Sclerotinia sclerotiorum 1980]
  misc_feature (4)..(268): NCBI GI: 189091832 Blast Desc: [Podospora anserina] gi|27803027|emb|CAD60730.1| protein product [Podospora anserina] gi|188219269|emb|CAP49249.1| protein product [Podospora anserina]
  misc_feature (4)..(272): NCBI GI: 225678770 Blast Desc: SGT1 family protein Sgt1 [Paracoccidioides brasiliensis Pb03]
  misc_feature (2)..(269): NCBI GI: 67525211 Blast Desc: AN3063.2 [Aspergillus nidulans FGSC A4] gi|40744458|gb|EAA63634.1| AN3063.2 [Aspergillus nidulans FGSC A4] gi|259485990|tpe|CBF83477.1| TPA: regulatory factor Sgt1, A4]
MLALSADKKGNNRLAREFAILLEDVEEDGHEALPSDKEIADWPEVTREDDDGWLNIDFEDFENELEGKKAKKRVEDGAFGDKKTQADLRRIVSRFEEFLNDETAGLEGAELDDMDEDNDTSDDEEDSSEDEDKAVSFDEDQFNRMMREMMGLPAESTTMSANDTVGGKTKSADSGTTEEEANEEDEIRQLAAQMEAELKGLGALKLDAKPETSKALDVGREEEEESISDEVDIDYNLAKNLLESFKGQAGMAGPAGNMLGMMGIQLPRDEDEDGDEEFRKG

SEQ ID NO: 39850 - DNA, 11942 bp, Muscodor strobelii; identical to SEQ ID NO: 39847
  misc_feature: SGI EST ID NO. CUFF.96887.1
  misc_feature: Variant of the nucleotide sequence at SEQ ID NO 39848

SEQ ID NO: 39851 - DNA, 3498 bp, Muscodor strobelii
  misc_feature: SGI cDNA ID NO. 573880
  misc_feature: Encodes the peptide sequence at SEQ ID NO 39852
atgccatccgcctcgtcttctaagcgttcgcgccgtacggcctttgctgacgacgatgatgctgacgagtacaccgtcacccaatctgccacgtccaacctgcgaggcgactcctcatacaaggatcgcaagaaggctcgactctcagcggcttcgcgcaagcatcgccgtgcggccaaccccgacgaagacgagcccatgcctgatcccgagcgagagcccactccgcctcccgccacccagtacgagctcgccagagaccagggcttcaaacatctcgaccacaccgaagaggacgaccaacgcgccacccagcgcctcagggaccgtcccaccatcataggcgacaaccatgccgcccagaacgccattatcgaggagatcacctgcatcaacttcatgtgccacaccaatctaagggtccagctggggcccctgctcaacttcgtcgtaggtgagaacggcagcggcaagagcgccgtcctgacggccattacactctgcctcggcggcaaggccagcgccaccaaccgcggagggagcttgaggagctttgtcaaagagggtcaggaccatgccagcctcgtcatcaagctcaagaaccagggcgaggacgcctacaagcccgatgtgtatggtgactccattacctgcgagcgctggttcaccaagtctggtggtagtggtttcaagctcaaatccactgccgggagggtcatctccacgaagaaggccgatgtcgaggacatcgttgagtggtactgtctccaggttgacaaccctctcaatgttttgtcccaggacaatgctaggcaattcctcaacgcagcaactccagctatgaagtacggctattttatcaaaggcacgcagctcgagcagcttgacgacgattataagcaatacatgcaatctctcgacgaccacgagtcgaaagtggttgagctggacgagaacctgacctatcttaagcaggaattcgagaaagcggtcaagcttcgggatgctgcaagccgagctacggaaatgcgccagcgtggtcaggtatacaaaaatcaactagcctgggctcaagtcaaagagcaggaagacatcctgaagcagaaagagaatgctatcttggctgctcaagaggaaattgatcgtgcgggggcggcaatcactcagaccacccaaaacctcgcgcatatcgatgacaaaatacagcatgcaagagccgccctggaatcggcacaacaagagaagggccaggcagatgagcgaaaacaagaggcgagagatcgtttcgatcaatgcaaggcagagctcgtcctattgcaaaccgaggaaagggatctgaagggcaaccttgatcaagccgccgctactgtcgaacaactggagggttcgatacgcgctgaggaaagcctcctccaggagaaaagcggaggagtcgtggcagagaagcagcgagagcttgaccaagccaaggaaacagaagaacggatccgacaatctattcaggaacacggcgatcgcctcaaaactcttcaaaccgaacgtgaaaaggccgattttgacgccaaagagccagaaactatgcttaagcgtaagagaaaggaggtacaggatgccgaagcagcattacaagcatcgcaacagaatcgaacagatccgttagacgggtttgggaggccaatgcatgagctcctgagactcatcaacaatgacagaaatttcgcgcaaaagccaataggaccattggggatacacatgcagctcaccaggcctcagtggatgccagtgtttgaaaaacagatgggaggagcgcttaacggtttcattgtccaaagcaagtcggaccaagtgagactcatgggtctcatggacagagtgaggatctcgaattcgcccgtgttcattggaaacccatccattcgacaacttcgagaacctgatgagaaatatgacaacatgttgagggttcttgaatttgacgatcagcgcgtaagagaccacctgatcattcagcaaaagatagaacagatccttcttatagaaagcagagtggaggcagaagaagtcatgtttcaccctgatgggccgccagaaaactcgtctgcatgcttggctctgaatgatcgacaaaagggtcatggtatgcgcatcacgaacaatcgcggtaatctaagcacgaatcctgtttctcccaacctcgctcaacgaccgcgtatgaagaccgatgatggtcgacaaatagagttctaccaaaaccttgtagcgcaactacaagaagaactcaatgacgcggagaagtcccgaaggatggctgaccaaggtattcagcgggtcacccaggccatcagtcaacataagaaacagggagagaggttaagttcgcaactcaagaatgcgagagtcggtattagacggatcgaagaggagctcgattctttcgacggcagcgacgatcgacttcaagggttaaaagaccaactgagagacgcccaagaaaggcaggatcaatgggggaaccagtttggagaagtggcggtgcgaaagaaggagaagaatgtcgagagcgaggcgctggcgaacgaggtcaggagtttcaaagtggaacttagggaccacgaggctcatgtgaacaaagccacggacaaggtgaagcgatacgaagacacacgccgtattgctttgagcgagaaaaacgcagcgcacgaaacagaagcgatggccaaagttgcgaaaacacaggccgaggcttctcgtgagcgccaggctacatacgtggccgagtacaacgagcaggccagccgtgttgcacccgagagagcatatatccccgaaggtgaaaacttccagaccatcgagcagaagtataatcagattcgcacggatttgcaaaggctgaggggccagatgggcgcttcggaagaagagattaacagccgagctgtcaaggcgacgcaggagtatcgcgatgccaaagccagctttaagaacgtacagtcgggcatggatctcatgaagaagtcgttaatggatcgactggccaagttccgagaattccagaggcacgtctcggcacaagcgcggtgcaattttggctatctcctgagcgagcgtggtttccgaggccaacttcttctcgatcaccgagccaagaaactcgaggtcatcgtcgagccggacaagacacgagagaacggaaaaggaagaaacacgaagacgctgtctggcggtgagaagtcattctcgtccatttgtctgctacttgccatttgggacgccatgggttcaccgctacggtgtctcgacgaattcgacgtcttcatggacaatgtcaatcgggccattagcacgaatatgctgatcgctgcggcccgtcggtccgtaggcaaacagttcatactcatcacgcccaacgccatcgagggacgcgcaaatctagataaggatgtcaagatcattaggcttacggatcctcggcaacaacgcattgataatatgatataa

SEQ ID NO: 39852 - protein, 1165 aa, Muscodor strobelii
  misc_feature: SGI Peptide ID NO. 573880
  misc_feature (124)..(1162): Pfam Id: PF02463 Pfam Desc: RecF/RecN/SMC N terminal domain
  misc_feature (287)..(1113): Pfam Id: PF02463 Pfam Desc: RecF/RecN/SMC N terminal domain
  misc_feature (5)..(1162): NCBI GI: 256732877 Blast Desc: NECHADRAFT_92410 [Nectria haematococca mpVI 77-13-4]
  misc_feature (7)..(1164): NCBI GI: 46136645 Blast Desc: FG09838.1 [Gibberella zeae PH-1]
  misc_feature (74)..(1161): NCBI GI: 85093572 Blast Desc: NCU02402 [Neurospora crassa OR74A] gi|28921172|gb|EAA30486.1| [Neurospora crassa OR74A]
  misc_feature (1)..(1164): NCBI GI: 189091834 Blast Desc: [Podospora anserina] gi|27803028|emb|CAD60731.1| protein product [Podospora anserina] gi|188219270|emb|CAP49250.1| protein product [Podospora anserina]
  misc_feature (5)..(1164): NCBI GI: 261361162 Blast Desc: conserved [Verticillium albo-atrum VaMs.102]
  misc_feature (19)..(1165): NCBI GI: 156042408 Blast Desc: SS1G_11001 [Sclerotinia sclerotiorum 1980] gi|154695388|gb|EDN95126.1| SS1G_11001 [Sclerotinia sclerotiorum 1980]
  misc_feature (73)..(1165): NCBI GI: 154300358 Blast Desc: BC1G_11368 [Botryotinia fuckeliana B05.10] gi|150856691|gb|EDN31883.1| BC1G_11368 [Botryotinia fuckeliana B05.10]
  misc_feature (5)..(1072): NCBI GI: 145616092 Blast Desc: MGG_13522 [Magnaporthe grisea 70-15] gi|145009858|gb|EDJ94514.1| MGG_13522 [Magnaporthe grisea 70-15]
  misc_feature (40)..(1156): NCBI GI: 240104921 Blast Desc: CPC735_044840 [Coccidioides posadasii C735 delta SOWgp]
  misc_feature (93)..(1156): NCBI GI: 119195457 Blast Desc: DNA repair protein homolog [Coccidioides immitis RS]
MPSASSSKRSRRTAFADDDDADEYTVTQSATSNLRGDSSYKDRKKARLSAASRKHRRAANPDEDEPMPDPEREPTPPPATQYELARDQGFKHLDHTEEDDQRATQRLRDRPTIIGDNHAAQNAIIEEITCINFMCHTNLRVQLGPLLNFVVGENGSGKSAVLTAITLCLGGKASATNRGGSLRSFVKEGQDHASLVIKLKNQGEDAYKPDVYGDSITCERWFTKSGGSGFKLKSTAGRVISTKKADVEDIVEWYCLQVDNPLNVLSQDNARQFLNAATPAMKYGYFIKGTQLEQLDDDYKQYMQSLDDHESKVVELDENLTYLKQEFEKAVKLRDAASRATEMRQRGQVYKNQLAWAQVKEQEDILKQKENAILAAQEEIDRAGAAITQTTQNLAHIDDKIQHARAALESAQQEKGQADERKQEARDRFDQCKAELVLLQTEERDLKGNLDQAAATVEQLEGSIRAEESLLQEKSGGVVAEKQRELDQAKETEERIRQSIQEHGDRLKTLQTEREKADFDAKEPETMLKRKRKEVQDAEAALQASQQNRTDPLDGFGRPMHELLRLINNDRNFAQKPIGPLGIHMQLTRPQWMPVFEKQMGGALNGFIVQSKSDQVRLMGLMDRVRISNSPVFIGNPSIRQLREPDEKYDNMLRVLEFDDQRVRDHLIIQQKIEQILLIESRVEAEEVMFHPDGPPENSSACLALNDRQKGHGMRITNNRGNLSTNPVSPNLAQRPRMKTDDGRQIEFYQNLVAQLQEELNDAEKSRRMADQGIQRVTQAISQHKKQGERLSSQLKNARVGIRRIEEELDSFDGSDDRLQGLKDQLRDAQERQDQWGNQFGEVAVRKKEKNVESEALANEVRSFKVELRDHEAHVNKATDKVKRYEDTRRIALSEKNAAHETEAMAKVAKTQAEASRERQATYVAEYNEQASRVAPERAYIPEGENFQTIEQKYNQIRTDLQRLRGQMGASEEEINSRAVKATQEYRDAKASFKNVQSGMDLMKKSLMDRLAKFREFQRHVSAQARCNFGYLLSERGFRGQLLLDHRAKKLEVIVEPDKTRENGKGRNTKTLSGGEKSFSSICLLLAIWDAMGSPLRCLDEFDVFMDNVNRAISTNMLIAAARRSVGKQFILITPNAIEGRANLDKDVKIIRLTDPRQQRIDNMI

SEQ ID NO: 39853 - DNA, 11867 bp, Muscodor strobelii; identical to SEQ ID NO: 39844
  misc_feature: SGI EST ID NO. CUFF.96886.0
  misc_feature: Variant of the nucleotide sequence at SEQ ID NO 39851

SEQ ID NO: 39854 - DNA, 729 bp, Muscodor strobelii
  misc_feature: SGI cDNA ID NO. 573881
  misc_feature: Reduced expression when VOC is produced
  misc_feature: Encodes the peptide sequence at SEQ ID NO 39855
cgggcagcgggctggcgcatgcgaagctaccattcgtacgaccacccctcgccgccgggcgtgggcgtgggcgacggcgacttcaacgatgccgagcaggccattctctccgccgcctaccgccacgtgcccgagcacggcttctcccaccacgccctgtcgctcggcgcccgcgacgccggctacctcgacatcagcaccaccctgctgcccgacgggcccttcagcctcatccgctggcacctcgtcacccagcgcgaagctctcgccccgcgcaccagcactctcttccccgccaccgaccccgtcacgcccgacatggtgcccgcccgcgtcgagcgcctgacctgggacaggttgctggccaacagggacgtgaaccatcgctggcaggaggctctcgccatcatggcccaacccgcccacgtcccctcctcgctccacgagctcgccctcctcgccgacgagatacaccacctggccggcgatgtctccgtcgaccccacgtggtacacgaaacgagccggcctgtccatgatatacacgtcctcggagctgttcatgaccaatgacccctcgccgggcttccaagacacccgcgcctttctccaacgccgctttgcccaggctggcaccctctcgggcgcagcggagagcgtcgcccagtgggctggcttcaccgcctccgctgctgtcaacgtgctgcgcagcaaaggcgtgagaatatga

SEQ ID NO: 39855 - protein, 242 aa, Muscodor strobelii
  misc_feature: SGI Peptide ID NO. 573881
  misc_feature (140)..(218): Pfam Id: PF08511 Pfam Desc: COQ9
  misc_feature (8)..(242): NCBI GI: 46136647 Blast Desc: FG09839.1 [Gibberella zeae PH-1]
  misc_feature (9)..(242): NCBI GI: 85093576 Blast Desc: NCU02403 [Neurospora crassa OR74A] gi|28921173|gb|EAA30487.1| conserved [Neurospora crassa OR74A]
  misc_feature (8)..(242): NCBI GI: 116179606 Blast Desc: CHGG_00431 [Chaetomium globosum CBS 148.51] gi|88184728|gb|EAQ92196.1| CHGG_00431 [Chaetomium globosum CBS 148.51]
  misc_feature (7)..(242): NCBI GI: 261361161 Blast Desc: conserved [Verticillium albo-atrum VaMs.102]
  misc_feature (8)..(242): NCBI GI: 154300360 Blast Desc: BC1G_11369 [Botryotinia fuckeliana B05.10] gi|150856692|gb|EDN31884.1| BC1G_11369 [Botryotinia fuckeliana B05.10]
  misc_feature (10)..(242): NCBI GI: 189211265 Blast Desc: ubiquinone biosynthesis protein COQ9, mitochondrial precursor [Pyrenophora tritici-repentis Pt-1C-BFP] gi|187978056|gb|EDU44682.1| ubiquinone biosynthesis protein COQ9,
  misc_feature (28)..(242): NCBI GI: 189091836 Blast Desc: [Podospora anserina] gi|27803029|emb|CAD60732.1| protein product [Podospora anserina] gi|188219271|emb|CAP49251.1| protein product [Podospora anserina]
  misc_feature (8)..(242): NCBI GI: 156042410 Blast Desc: SS1G_11002 [Sclerotinia sclerotiorum 1980] gi|154695389|gb|EDN95127.1| SS1G_11002 [Sclerotinia sclerotiorum 1980]
  misc_feature (2)..(242): NCBI GI: 169600445 Blast Desc: SNOG_03056 [Phaeosphaeria nodorum SN15] gi|160705440|gb|EAT89787.2| SNOG_03056 [Phaeosphaeria nodorum SN15]
  misc_feature (8)..(242): NCBI GI: 169764427 Blast Desc: [Aspergillus oryzae RIB40] gi|238504326|ref|XP_002383394.1| AFLA_052680 [Aspergillus flavus NRRL3357] gi|83764539|dbj|BAE54683.1| protein product oryzae]
  misc_feature: Useful for introducing or modulating the production of volatile compounds
RAAGWRMRSYHSYDHPSPPGVGVGDGDFNDAEQAILSAAYRHVPEHGFSHHALSLGARDAGYLDISTTLLPDGPFSLIRWHLVTQREALAPRTSTLFPATDPVTPDMVPARVERLTWDRLLANRDVNHRWQEALAIMAQPAHVPSSLHELALLADEIHHLAGDVSVDPTWYTKRAGLSMIYTSSELFMTNDPSPGFQDTRAFLQRRFAQAGTLSGAAESVAQWAGFTASAAVNVLRSKGVRI

SEQ ID NO: 39856 - DNA, 11942 bp, Muscodor strobelii; identical to SEQ ID NO: 39847
  misc_feature: SGI EST ID NO. CUFF.96887.1
  misc_feature: Variant of the nucleotide sequence at SEQ ID NO 39854

SEQ ID NO: 39857 - DNA, 942 bp, Muscodor strobelii
  misc_feature: SGI cDNA ID NO. 573882
  misc_feature: Elevated expression when VOC is produced
  misc_feature: Encodes the peptide sequence at SEQ ID NO 39858
atggctgaggaaagcagtacccacctcaaaggtcaaaaggacaaagccaggaagcgcggcacctctctccaaaggaaggcggtggagctaggccagaaagcaaatgtcttcgcggcagtggtctactggaacccgacccatcaacaattcgacgctgcggtgcatattcctaaaggccagacgctgcccagtggcgaagaccttcggagagttctagcgtcttgttctcaaaggacacgatcgaatccgccaagacgagctcgaaaggacgtcaaaggtcgccaagcccaagctagcagcgaccatgccttcgcgagttccagttctcaatttgaatggcatctcggcagccctgcgacggctgaccacgccagtgattgtgtgcaagtcgacagcaataccgttgccgacgataccatcgtgcttcataaaagcccaacagcgacgacgtcaccaatccaaccggacgatcatatcattagaagtgaaaaagcgacagacacgcaatccgacgaggaacgaacagggccgcggacaactggtcaaacgccagagggaccaacatttctggacgacctgccaagcgatcatagtgaacaccaagatagctcggcggatagtatgcagatagatgcgccatgggatatcatcgagactagtacagcggggcacattgacgtcgacggtttagagtcaacttgccagacgaaggctgcaggtggccacaaacaaccgaaccaacagcagacggtccctgtgggcgtcgtggcgcagcgaatcctcgctattctccggccccaaaggactacaggcacaactcgtgccgtcctgtcggtaaccaatgtagagatcgaaccaatggactcgaaaggccgtcggaagcacatgcctgaattggatactgctacgaagttgcaactcggatttgtgaaggtacagtaa

SEQ ID NO: 39858 - protein, 313 aa, Muscodor strobelii
  misc_feature: SGI Peptide ID NO. 573882
  misc_feature: Useful for introducing or modulating the production of volatile compounds
MAEESSTHLKGQKDKARKRGTSLQRKAVELGQKANVFAAVVYWNPTHQQFDAAVHIPKGQTLPSGEDLRRVLASCSQRTRSNPPRRARKDVKGRQAQASSDHAFASSSSQFEWHLGSPATADHASDCVQVDSNTVADDTIVLHKSPTATTSPIQPDDHIIRSEKATDTQSDEERTGPRTTGQTPEGPTFLDDLPSDHSEHQDSSADSMQIDAPWDIIETSTAGHIDVDGLESTCQTKAAGGHKQPNQQQTVPVGVVAQRILAILRPQRTTGTTRAVLSVTNVEIEPMDSKGRRKHMPELDTATKLQLGFVKVQ

SEQ ID NO: 39859 - DNA, 1147 bp, Muscodor strobelii
  misc_feature: SGI EST ID NO. CUFF.96314.0
  misc_feature: Variant of the nucleotide sequence at SEQ ID NO 39857
atggcgtgcagggaaccctctcttaccgtatggacgtctatattctgactctgcactttgttcgagctattctccacggtccccatggctgaggaaagcagtacccacctcaaaggtcaaaaggacaaagccaggaagcgcggcacctctctccaaaggaaggcggtggagctaggccagaaagcaaatgtcttcgcggcagtggtctactggaacccgacccatcaacaattcgacgctgcggtgcatattcctaaaggccagacgctgcccagtggcgaagaccttcggagagttctagcgtcttgttctcaaaggacacgatcgaatccgccaagacgagctcgaaaggacgtcaaaggtcgccaagcccaagctagcagcgaccatgccttcgcgagttccagttctcaatttgaatggcatctcggcagccctgcgacggctgaccacgccagtgattgtgtgcaagtcgacagcaataccgttgccgacgataccatcgtgcttcataaaagcccaacagcgacgacgtcaccaatccaaccggacgatcatatcattagaagtgaaaaagcgacagacacgcaatccgacgaggaacgaacagggccgcggacaactggtcaaacgccagagggaccaacatttctggacgacctgccaagcgatcatagtgaacaccaagatagctcggcggatagtatgcagatagatgcgccatgggatatcatcgagactagtacagcggggcacattgacgtcgacggtttagagtcaagtaggcagcatcattgcgcaggcagtagatcgccccgatgtatgcgagattgttcagcttgccagacgaaggctgcaggtggccacaaacaaccgaaccaacagcagacggtccctgtgggcgtcgtggcgcagcgaatcctcgctattctccggccccaaaggactacaggcacaactgtatgttcgtcacagtagttcgcatagatcacatcgaatagtggaatagccaggctagttggtatataacgcaggctgtctattgtagctatgatgcattccgtgagactcccacctgcccgtttccaatgctgctggcggactgcacagctgcttgagcatgcatggttcttgctctagcgtgccg

SEQ ID NO: 39860 - DNA, 1620 bp, Muscodor strobelii
  misc_feature: SGI cDNA ID NO. 573883
  misc_feature: Reduced expression when VOC is produced
  misc_feature: Encodes the peptide sequence at SEQ ID NO 39861
atgtaccaagacacggccagcgacaagcacacgccctcgcagacgtatctgtcgacgaggggcggcgactatggcctccccttcgagacggtcgtgctcaagggcctcgcagccgacggcggcctgtttctgccccatcgcatcccctcggtagaggactggcaaagctggaaggacctgtcctacaccgagctggccttccgcatcttcagcctgtacatctccgccgacgagatccccgccgacgacctcaaggccatcatcgaccggagctactcgaccttccgcgccgacgacgtcgccccgctcgtccacctgcaggacaacaacctctatctcctcgagctgttccacgggcccagctactccttcaaggactgtgccctgcagttcctcggcaacctcttcgagtacttcctcgtccgcagaaatcagggcaaggagggcaaagaccgtcatcacctgactgtcgtgggcgcaaccagtggtgatactggatccgccgctatctacggcctccggggcaagaaagacgtctctgtcttcatcctccatccgaaaggccgcgtgagcccgatacaagaggcccagatgacgacgtgtctcgatgcaaatgtacacaatattgccgtcactggcacgttcgacgactgccaggacatcgtcaaggccctcttcggtgacgccgacacaaaccaggcgctcaagcttggcgccgtcaactccatcaacttctccagaatcctggcccagattgtctactacttttactcgtacttctcgcttgccaggtcctccagctcattcaatgtcggagacaaggtgcgctttgtcacacctactggcaactttggaaatatcctcgctggatacctcgctaccagaatgggcctaccagcggagaaactggttgtcgcgacgaacgaaaacgacattctgtaccgtttctggcaaactggccgttatgagaagcaacccgtcagcaatggggatgccggcgagaagccagtgcatagcgatggatgcaaggaaaccttaagtccagcgatggatattttggtatctagtaatttcgaacgactcatgtggttcatggccgaaggtttcgcatccacggtgggtatggatgagcagtttgacaagaagcaggctggtcaggaagtcaccgcatggtatcagtcactgaaaaccacaggcggctttggacctgtgcacccggatatgatgaagactggtcgcgagaccttcgaaagcgagcgcgtgagcgacgcagagacgttggagaccatccaggcttgctacggcaaaaataaatatgttctcgaccctcacaccgccgtgggagtggccgcggctacgagatcaatctccagaacaggcggtagtgtacatcatatctccctgtcgaccgctcatccagccaagttctcgggcgccgtagagtcggcacttagcggagagcaagacttcagctttgacgagcaagtactacctgccgagttcagagacttgctccagagggagaggcgcgtcatccacgtggagaactcgtgggagaaggtgagggaggctgtaaaacatcaggtggacatagatttgaatggaacccgtgtttcatag

SEQ ID NO: 39861 - protein, 539 aa, Muscodor strobelii
  misc_feature: SGI Peptide ID NO. 573883
  misc_feature (94)..(469): Pfam Id: PF00291 Pfam Desc: Pyridoxal-phosphate dependent enzyme
  misc_feature (94)..(361): Pfam Id: PF00291 Pfam Desc: Pyridoxal-phosphate dependent enzyme
  misc_feature (6)..(533): NCBI GI: 115399997 Blast Desc: threonine synthase [Aspergillus terreus NIH2624] gi|114191253|gb|EAU32953.1| threonine synthase [Aspergillus terreus NIH2624]
  misc_feature (11)..(535): NCBI GI: 169781422 Blast Desc: [Aspergillus oryzae RIB40] gi|83773916|dbj|BAE64041.1| protein product [Aspergillus oryzae]
  misc_feature (1)..(529): NCBI GI: 119189451 Blast Desc: CIMG_04773 [Coccidioides immitis RS]
  misc_feature (1)..(529): NCBI GI: 240111228 Blast Desc: threonine synthase, [Coccidioides posadasii C735 delta SOWgp]
  misc_feature (6)..(535): NCBI GI: 145614182 Blast Desc: MGG_08923 [Magnaporthe grisea 70-15] gi|145021132|gb|EDK05261.1| MGG_08923 [Magnaporthe grisea 70-15]
  misc_feature (10)..(535): NCBI GI: 256727299 Blast Desc: [Nectria haematococca mpVI 77-13-4]
  misc_feature (10)..(535): NCBI GI: 85081402 Blast Desc: threonine synthase [Neurospora crassa OR74A] gi|18376360|emb|CAD21138.1| threonine synthase [Neurospora crassa] gi|28917786|gb|EAA27475.1| threonine synthase [Neurospora
  misc_feature (10)..(522): NCBI GI: 116200013 Blast Desc: threonine synthase [Chaetomium globosum CBS 148.51] gi|88179441|gb|EAQ86909.1| threonine synthase [Chaetomium globosum CBS 148.51]
  misc_feature (6)..(535): NCBI GI: 46122671 Blast Desc: FG05713.1 [Gibberella zeae PH-1]
  misc_feature (5)..(530): NCBI GI: 171689902 Blast Desc: protein product [Podospora anserina] gi|170944913|emb|CAP71024.1| protein product [Podospora anserina]
  misc_feature (15)..(512): SWISSPROT Homolog: EC 4.2.3.1 Threonine synthase
  misc_feature: Useful for introducing or modulating the production of volatile compounds
MYQDTASDKHTPSQTYLSTRGGDYGLPFETVVLKGLAADGGLFLPHRIPSVEDWQSWKDLSYTELAFRIFSLYISADEIPADDLKAIIDRSYSTFRADDVAPLVHLQDNNLYLLELFHGPSYSFKDCALQFLGNLFEYFLVRRNQGKEGKDRHHLTVVGATSGDTGSAAIYGLRGKKDVSVFILHPKGRVSPIQEAQMTTCLDANVHNIAVTGTFDDCQDIVKALFGDADTNQALKLGAVNSINFSRILAQIVYYFYSYFSLARSSSSFNVGDKVRFVTPTGNFGNILAGYLATRMGLPAEKLVVATNENDILYRFWQTGRYEKQPVSNGDAGEKPVHSDGCKETLSPAMDILVSSNFERLMWFMAEGFASTVGMDEQFDKKQAGQEVTAWYQSLKTTGGFGPVHPDMMKTGRETFESERVSDAETLETIQACYGKNKYVLDPHTAVGVAAATRSISRTGGSVHHISLSTAHPAKFSGAVESALSGEQDFSFDEQVLPAEFRDLLQRERRVIHVENSWEKVREAVKHQVDIDLNGTRVS

SEQ ID NO: 39862 - DNA, 6210 bp, Muscodor strobelii
  misc_feature: SGI EST ID NO. CUFF.96475.2
  misc_feature: Variant of the nucleotide sequence at SEQ ID NO 39860
tgctaaaccaccttgtctacgacctatcgtcttccatggacatgattcggcatgttaaactttccataacctatagagaactgcgtctcctatacgtggggctctagaccagctctctcgggttccacggtactccatgcggtaactaacgtgttcgagttcaatagcgggcatttacttgaaggcgggtcaaacagctttggcctgcatgagatcaactatttcgtggatgtgccgacggtgattagcaggttcgccggcaagctctccgcctcgaattccagcgtcgtctgccagtgtacacagtatattggccggcaacgtgttccgaacagttgcttgaattcggacagcatcacctgcttcgatccgttgtggctcaccgttctctccaataggggtcatcttttcgtgccggcatcagccgacagcatcaccacggccgtcccgttgtcagccgggtacacgctctaattgtccaagacggaggagtagacacgactcggtcctgtaagtatcccgatgcggtgggcgataaacggttgcatacgactttgggatgtacggtggccggaatgctgagatccatgtcgggtgacaagggacgatcataataagaagttgtaccaagtcaggacagataggtataaatacaacgcaggccccataatctgtgcaagacacgtcacagcacaagtcactcgccgcatctgtagccgtgaacacctcaagcggcagccaccagataatagtctacatgtccattgcaggtagtctatgcacgtgctgcagataataagttgcagcgtcgatccttgattcctgcctgaacatggccgatacgctacccatttcaagagctataccgaatgcctgtgtcacaaagacgagcacatggtaggcgagagagaaagagaggaggaagcgaacgcaattgatggattacgacgagggactgctgacggggatgaaagctgtggaagattggtggccgagccccacgacgtcgagtcagacagcagggactacgcttatggggccgatcgcggcggacggcagagaaagccaattgaccaacgggcccgaatgcggtcgtgtctgctaagaaatttcaacggagcgccttggaagtattccctaatgcctaggtagactcgtggatgggtggataagcgaatgagcgaatgaatgagtgaatgaattactgaacgaacgaccaacaaccggcacagtaacaacaaccacagggagacaccacgcaagtgacggggcaaggagacccagaagagccgatcgagcgtcgactgtggccatgtaccaagacacggccagcgacaagcacacgccctcgcagacgtatctgtcgacgaggggcggcgactatggcctccccttcgagacggtcgtgctcaagggcctcgcagccgacggcggcctgtttctgccccatcgcatcccctcggtagaggactggcaaagctggaaggacctgtcctacaccgagctggccttccgcatcttcagcctgtacatctccgccgacgagatccccgccgacgacctcaaggccatcatcgaccggagctactcgaccttccgcgccgacgacgtcgccccgctcgtccacctgcaggacaacaacctctatctcctcgagctgttccacgggcccagctactccttcaaggactgtgccctgcagttcctcggcaacctcttcgagtacttcctcgtccgcagaaatcagggcaaggagggcaaaggtgcgccaccgagcagagcagcctgtcaccgacgtcctggccggctaacatcgataccagaccgtcatcacctgactgtcgtgggcgcaaccagtggtgatactggatccgccgctatctacggcctccggggcaagaaagacgtctctgtcttcatcctccatccgaaaggccgcgtgagcccgatacaagaggcccagatgacgacgtgtctcgatgcaaatgtacacaatattgccgtcactggcacgttcgacgactgccaggacatcgtcaaggccctcttcggtgacgccgacacaaaccaggcgctcaagcttggcgccgtcaactccatcaacttctccagaatcctggcccagattgtctactacttttactcgtacttctcgcttgccaggtcctccagctcattcaatgtcggagacaaggtgcgctttgtcacacctactggcaactttggaaatatcctcgctggatacctcgctaccagaatgggcctaccagcggagaaactggttgtcgcgacgaacgaaaacgacattctgtaccgtttctggcaaactggccgttatgagaagcaacccgtcagcaatggggatgccggcgagaagccagtgcatagcgatggatgcaaggaaaccttaagtccagcgatggatattttggtatctagtaatttcgaacgactcatgtggttcatggccgaaggtttcgcatccacggtgggtatggatgagcagtttgacaagaagcaggctggtcaggaagtcaccgcatggtatcagtcactgaaaaccacaggcggctttggacctgtgcacccggatatgatgaagactggtcgcgagaccttcgaaagcgagcgcgtgagcgacgcagagacgttggagaccatccaggcttgctacggcaaaaataaatatgttctcgaccctcacaccgccgtgggagtggccgcggctacgagatcaatctccagaacaggcggtagtgtacatcatatctccctgtcgaccgctcatccagccaagttctcgggcgccgtagagtcggcacttagcggagagcaagacttcagctttgacgagcaagtactacctgccgagttcagagacttgctccagagggagaggcgcgtcatccacgtggagaactcgtgggagaaggtgagggaggctgtaaaacatcaggtggacatagatttgaatggaacccgtgtttcatagagctcaataggcttcggggtcagaaaatatagaacactatgtctcacaattctatgtcactgcgagatttcttcggcaaccctacaaagcaccaccggtaattcgcaatagacagagtaacagacagatctaaattgaccatgcatcgtatatatatagcctatgactgacggttaggcctaagatttcgctatgagtcctacttatttccagttcctttcggtcctttccatgccatccttgtatgcaattctgccacagaaagatgaatacagaatgtgcaaacgccgacagtgccgatgggtatctataaaaccagatgcatcattacaaaagtgcgcccggaatgcggaacagaaagtaaagccgcaggcatatgcagaaaagaaaaaccaccgatgcaccccccaaattctctggtatatcctcagatcaaagttcgtaagtcggcatagcgtcgtaaaaatatcctcaacctcatcctaccaagccgaattccacggccagctgtgctgatatcgcactcaagataagaagacattgttgccaactacgaaggctcgtcatagttggtgggatgctatcatgtatgaagcagaccgagctgcaatttgcggtcatcgagtcactgacacatggaaccaggtcatggccgcaatagataaagaccgctgtgccgtcgtgcaacaaagcagcaaggaaaacaaacaaggcgagcacgaggtgactgcaatgaagtgtcactgtgatcgatgtctgcgtcgagaggagagaccaagtaggctggccaccaagcaaccgaaaagtgtgcttgctaccacaacactcatcagtgcccagcagcgacaagggtcatccatttttgcaggactagcctcccagacggcctgagccttaggccaacgtgaaacaaacatcagcattcagctcgtcaaggaattcgtctaggtaaataatccggaagcgccggccatacttcttgctgagctcctgattcttccaggcagaagaaatagctcgcttccatgtgacaagctcgaggttccacccgttctcaagggcgcgaatggcgtattgcaagaagccatcggagaactcagcctctgcggcgtctccagtggcaagaacaatcgttgcaggatttgacatgaagtcgaccacgctgtccatcattttcagatggagaatctcatccactgcttgctcaccattcttggtctcgtagcccattgtcgcctggtcttcagtcgactcatcaccgctagtgacaccatcagactgtccagcatggggaccggatggcgatggcctgcgtcgtcgtccgcctttgatgggcgctaacttctgaacacgattcaagacattcatcttgtatccttgggcatgtgcctcatacaagtgtgcaggccaccgcgatttgtcggtggtcgtggatacagagcctgcaaggaccttcttctcgacggcgcggctacgttccaagatggaagtgaagatcttgaagttaaatttcggagctcgtatgttccgagatagcggaatgttctgtgatatcttccaagagtcacagaatccaatgaatatgtttgacatatccacgaaaatatgcaaaggacgtacacaatcgtcggcatgatctcgtacactatgattgtgacgcttgttctcgaaggcctgccatacagcatcgtgataagtacgcatggcttcttggtagtcaagagacgagctcggactgggaaaagcagatgcagtcacgtcgagagactggaagtcggccaccttctcggtctgcattgtagtctgatcagctgtaacagatgcttcttggagtccttgaagagaggcgtacagctcggtgaagctgtgtgtctttgccgtcttttgggctctctccagggtgattttcccgctattgtagaactcgacaattctctctggggaccagaagcagaatgacttgctcgcactcggcggctggtgacacgtagcagctgaggaaccagttgctggtcgagcgaccgatgtgaggaaacccttgataatatcacgaagggagtcaacatcagtgacaagctggtcatcaacaacaacggagctcggtacgtcttggctgcatgaagacatatccaccgactctggcaatttatcagctagtcggggaattgactgttgtgttgcatgtttcacatcttgtttgttgatcgttgtcagctttaccttgatgtctggcgtgggcgaggaaaatagttctggagctgtgtgggcgaatcctgaagaaggcgtcgtctctgcggtggcaaggggagtgttcctggtagagctcaagaattgggattcgacggcagtctcatcatcagatgtggcatcgctgccagacaacaggggcagctcatcatcgcttggattgaaatcgatctctttgctgttgatgtggctaggtagggcatggctagcggtctgattgttaacatcagactgatggaatgtgctggccacatctgcatgtctattctctggcgtgtcttgcacacccggtgcagatggaaggggtgaagcacatgggagatcacgagacgacaagtctggcgtacgtgtatggctaagggcaggttagatataccaaagagcagaagacggttgaatggggcaaatggcttggttcaggagagtgagtgtgtgacagccgaaagggtgacacgaacctttgtgagtgggtgtcttcgattgtagcaaaaagcgagatgagaccgtcacctagacgcgggacagatgaccttttcttgatcactcgcgagccattgggtccgggccgttgcgaaatggccttgatcttgcctgaagaagacatcaggtgcacaacacctgcctcgaggacatcgaggcgcggtcgagaatggtcagagctgtgtactgggctgactctgaggggctcaagggccttagttgattctagctcaactgccatgcttggaagtgcaagatcagacaggctgagttgagaagaaggtggctacagtgtagtggtcgcagttgaccgcagacgcggagaagatggctttgttgaaagtgcaacaatgctaattatatgtgagctagaggtttctaacttaaatagcatgagagaactgcgggccctgcaaagacagatagatagacggatggcggtgggtgagagtgaaaacacgatccaagggcagtgttgggaggaaagaacg

SEQ ID NO: 39863 - DNA, 1680 bp, Muscodor strobelii
  misc_feature: SGI cDNA ID NO. 573884
  misc_feature: Reduced expression when VOC is produced
  misc_feature: Encodes the peptide sequence at SEQ ID NO 39864
atgtaccaagacacggccagcgacaagcacacgccctcgcagacgtatctgtcgacgaggggcggcgactatggcctccccttcgagacggtcgtgctcaagggcctcgcagccgacggcggcctgtttctgccccatcgcatcccctcggtagaggactggcaaagctggaaggacctgtcctacaccgagctggccttccgcatcttcagcctgtacatctccgccgacgagatccccgccgacgacctcaaggccatcatcgaccggagctactcgaccttccgcgccgacgacgtcgccccgctcgtccacctgcaggacaacaacctctatctcctcgagctgttccacgggcccagctactccttcaaggactgtgccctgcagttcctcggcaacctcttcgagtacttcctcgtccgcagaaatcagggcaaggagggcaaaggtgcgccaccgagcagagcagcctgtcaccgacgtcctggccggctaacatcgataccagaccgtcatcacctgactgtcgtgggcgcaaccagtggtgatactggatccgccgctatctacggcctccggggcaagaaagacgtctctgtcttcatcctccatccgaaaggccgcgtgagcccgatacaagaggcccagatgacgacgtgtctcgatgcaaatgtacacaatattgccgtcactggcacgttcgacgactgccaggacatcgtcaaggccctcttcggtgacgccgacacaaaccaggcgctcaagcttggcgccgtcaactccatcaacttctccagaatcctggcccagattgtctactacttttactcgtacttctcgcttgccaggtcctccagctcattcaatgtcggagacaaggtgcgctttgtcacacctactggcaactttggaaatatcctcgctggatacctcgctaccagaatgggcctaccagcggagaaactggttgtcgcgacgaacgaaaacgacattctgtaccgtttctggcaaactggccgttatgagaagcaacccgtcagcaatggggatgccggcgagaagccagtgcatagcgatggatgcaaggaaaccttaagtccagcgatggatattttggtatctagtaatttcgaacgactcatgtggttcatggccgaaggtttcgcatccacggtgggtatggatgagcagtttgacaagaagcaggctggtcaggaagtcaccgcatggtatcagtcactgaaaaccacaggcggctttggacctgtgcacccggatatgatgaagactggtcgcgagaccttcgaaagcgagcgcgtgagcgacgcagagacgttggagaccatccaggcttgctacggcaaaaataaatatgttctcgaccctcacaccgccgtgggagtggccgcggctacgagatcaatctccagaacaggcggtagtgtacatcatatctccctgtcgaccgctcatccagccaagttctcgggcgccgtagagtcggcacttagcggagagcaagacttcagctttgacgagcaagtactacctgccgagttcagagacttgctccagagggagaggcgcgtcatccacgtggagaactcgtgggagaaggtgagggaggctgtaaaacatcaggtggacatagatttgaatggaacccgtgtttcatag

SEQ ID NO: 39864 - protein, 559 aa, Muscodor strobelii
  misc_feature: SGI Peptide ID NO. 573884
  misc_feature (94)..(489): Pfam Id: PF00291 Pfam Desc: Pyridoxal-phosphate dependent enzyme
  misc_feature (94)..(381): Pfam Id: PF00291 Pfam Desc: Pyridoxal-phosphate dependent enzyme
  misc_feature (6)..(553): NCBI GI: 115399997 Blast Desc: threonine synthase [Aspergillus terreus NIH2624] gi|114191253|gb|EAU32953.1| threonine synthase [Aspergillus terreus NIH2624]
  misc_feature (1)..(549): NCBI GI: 119189451 Blast Desc: CIMG_04773 [Coccidioides immitis RS]
  misc_feature (1)..(549): NCBI GI: 240111228 Blast Desc: threonine synthase, [Coccidioides posadasii C735 delta SOWgp]
  misc_feature (6)..(555): NCBI GI: 145614182 Blast Desc: MGG_08923 [Magnaporthe grisea 70-15] gi|145021132|gb|EDK05261.1| MGG_08923 [Magnaporthe grisea 70-15]
  misc_feature (10)..(555): NCBI GI: 256727299 Blast Desc: [Nectria haematococca mpVI 77-13-4]
  misc_feature (10)..(555): NCBI GI: 85081402 Blast Desc: threonine synthase [Neurospora crassa OR74A] gi|18376360|emb|CAD21138.1| threonine synthase [Neurospora crassa] gi|28917786|gb|EAA27475.1| threonine synthase [Neurospora
  misc_feature (10)..(542): NCBI GI: 116200013 Blast Desc: threonine synthase [Chaetomium globosum CBS 148.51] gi|88179441|gb|EAQ86909.1| threonine synthase [Chaetomium globosum CBS 148.51]
  misc_feature (6)..(555): NCBI GI: 46122671 Blast Desc: FG05713.1 [Gibberella zeae PH-1]
  misc_feature (5)..(550): NCBI GI: 171689902 Blast Desc: protein product [Podospora anserina] gi|170944913|emb|CAP71024.1| protein product [Podospora anserina]
  misc_feature (10)..(557): NCBI GI: 156034360 Blast Desc: SS1G_13483 [Sclerotinia sclerotiorum 1980] gi|154698886|gb|EDN98624.1| SS1G_13483 [Sclerotinia sclerotiorum 1980]
  misc_feature (15)..(532): SWISSPROT Homolog: EC 4.2.3.1 Threonine synthase
  misc_feature: Useful for introducing or modulating the production of volatile compounds
MYQDTASDKHTPSQTYLSTRGGDYGLPFETVVLKGLAADGGLFLPHRIPSVEDWQSWKDLSYTELAFRIFSLYISADEIPADDLKAIIDRSYSTFRADDVAPLVHLQDNNLYLLELFHGPSYSFKDCALQFLGNLFEYFLVRRNQGKEGKGAPPSRAACHRRPGRLTSIPDRHHLTVVGATSGDTGSAAIYGLRGKKDVSVFILHPKGRVSPIQEAQMTTCLDANVHNIAVTGTFDDCQDIVKALFGDADTNQALKLGAVNSINFSRILAQIVYYFYSYFSLARSSSSFNVGDKVRFVTPTGNFGNILAGYLATRMGLPAEKLVVATNENDILYRFWQTGRYEKQPVSNGDAGEKPVHSDGCKETLSPAMDILVSSNFERLMWFMAEGFASTVGMDEQFDKKQAGQEVTAWYQSLKTTGGFGPVHPDMMKTGRETFESERVSDAETLETIQACYGKNKYVLDPHTAVGVAAATRSISRTGGSVHHISLSTAHPAKFSGAVESALSGEQDFSFDEQVLPAEFRDLLQRERRVIHVENSWEKVREAVKHQVDIDLNGTRVS

SEQ ID NO: 39865 - DNA, 6210 bp, Muscodor strobelii; identical to SEQ ID NO: 39862
  misc_feature: SGI EST ID NO. CUFF.96475.2
  misc_feature: Variant of the nucleotide sequence at SEQ ID NO 39863

SEQ ID NO: 39866 - DNA, 903 bp, Muscodor strobelii
  misc_feature: SGI cDNA ID NO. 573885
  misc_feature: Encodes the peptide sequence at SEQ ID NO 39867
atgcagaccgagaaggtggccgacttccagtctctcgacgtgactgcatctgcttttcccagtccgagctcgtctcttgactaccaagaagccatgcgtacttatcacgatgctgtatggcaggccttcgagaacaagcgtcacaatcatagtgtacgagatcatgccgacgattgtgtacgtcctttgcatattttcgtggatatgtcaaacatattcattggattctgtgactcttggaagatatcacagaacattccgctatctcggaacatacgagctccgaaatttaacttcaagatcttcacttccatcttggaacgtagccgcgccgtcgagaagaaggtccttgcaggctctgtatccacgaccaccgacaaatcgcggtggcctgcacacttgtatgaggcacatgcccaaggatacaagatgaatgtcttgaatcgtgttcagaagttagcgcccatcaaaggcggacgacgacgcaggccatcgccatccggtccccatgctggacagtctgatggtgtcactagcggtgatgagtcgactgaagaccaggcgacaatgggctacgagaccaagaatggtgagcaagcagtggatgagattctccatctgaaaatgatggacagcgtggtcgacttcatgtcaaatcctgcaacgattgttcttgccactggagacgccgcagaggctgagttctccgatggcttcttgcaatacgccattcgcgcccttgagaacgggtggaacctcgagcttgtcacatggaagcgagctatttcttctgcctggaagaatcaggagctcagcaagaagtatggccggcgcttccggattatttacctagacgaattccttgacgagctgaatgctgatgtttgtttcacgttggcctaa

SEQ ID NO: 39867 - protein, 300 aa, Muscodor strobelii
  misc_feature: SGI Peptide ID NO. 573885
  misc_feature (62)..(291): NCBI GI: 116179508 Blast Desc: CHGG_00382 [Chaetomium globosum CBS 148.51] gi|88184679|gb|EAQ92147.1| CHGG_00382 [Chaetomium globosum CBS 148.51]
  misc_feature (57)..(295): NCBI GI: 145616156 Blast Desc: MGG_03531 [Magnaporthe grisea 70-15] gi|145009908|gb|EDJ94564.1| MGG_03531 [Magnaporthe grisea 70-15]
  misc_feature (59)..(291): NCBI GI: 169764393 Blast Desc: [Aspergillus oryzae RIB40] gi|83764522|dbj|BAE54666.1| protein product [Aspergillus oryzae]
  misc_feature (59)..(291): NCBI GI: 238504360 Blast Desc: conserved [Aspergillus flavus NRRL3357] gi|220690882|gb|EED47231.1| conserved [Aspergillus flavus NRRL3357]
  misc_feature (61)..(291): NCBI GI: 119472608 Blast Desc: NFIA_058410 [Neosartorya fischeri NRRL 181] gi|119406539|gb|EAW16490.1| conserved [Neosartorya fischeri NRRL 181]
  misc_feature (61)..(291): NCBI GI: 159124694 Blast Desc: conserved [Aspergillus fumigatus A1163]
  misc_feature (35)..(291): NCBI GI: 145236667 Blast Desc: An06g01600 [Aspergillus niger] gi|134075442|emb|CAK48003.1| protein product [Aspergillus niger]
  misc_feature (47)..(291): NCBI GI: 189091924 Blast Desc: [Podospora anserina] gi|27803072|emb|CAD60775.1| protein product [Podospora anserina] gi|188219315|emb|CAP49295.1| protein product [Podospora anserina]
  misc_feature (61)..(291): NCBI GI: 70992547 Blast Desc: conserved [Aspergillus fumigatus Af293] gi|66848755|gb|EAL89084.1| conserved [Aspergillus fumigatus Af293]
  misc_feature (61)..(291): NCBI GI: 121700068 Blast Desc: conserved [Aspergillus clavatus NRRL 1] gi|119396441|gb|EAW06873.1| conserved [Aspergillus clavatus NRRL 1]
MQTEKVADFQSLDVTASAFPSPSSSLDYQEAMRTYHDAVWQAFENKRHNHSVRDHADDCVRPLHIFVDMSNIFIGFCDSWKISQNIPLSRNIRAPKFNFKIFTSILERSRAVEKKVLAGSVSTTTDKSRWPAHLYEAHAQGYKMNVLNRVQKLAPIKGGRRRRPSPSGPHAGQSDGVTSGDESTEDQATMGYETKNGEQAVDEILHLKMMDSVVDFMSNPATIVLATGDAAEAEFSDGFLQYAIRALENGWNLELVTWKRAISSAWKNQELSKKYGRRFRIIYLDEFLDELNADVCFTLA

SEQ ID NO: 39868 - DNA, 4126 bp, Muscodor strobelii
  misc_feature: SGI EST ID NO. CUFF.96476.4
  misc_feature: Variant of the nucleotide sequence at SEQ ID NO 39866
cgctggacaaagtggacctcaaaggcggaaggtggcacctacctacctacctaagcccaacttgccttcgaccgcaactatgaatcaacgattctatgatgtggcggaacaatgacctttgacttgcactggttgcaacttccatctctctcgtctgccacctcacttcttgacacctcctaacctcgtctcggactcaaatggcaattcttccttcaaaccgtcgtcctctgcctcattgcctaactgattcataactcttcttactctatcctcacggccagcagggagccatcgacgctgaacgccgcctcttcaactatgattcctccccttgacattcattctctgcttcctgtcttcatctgacagttgactttacttctcttaagttctgcattgttgcactttcaacaaagccatcttctccgcgtctgcggtcaactgcgaccactacactgtagccaccttcttctcaactcagcctgtctgatcttgcacttccaagcatggcagttgagctagaatcaactaaggcccttgagcccctcagagtcagcccagtacacagctctgaccattctcgaccgcgcctcgatgtcctcgaggcaggtgttgtgcacctgatgtcttcttcaggcaagatcaaggccatttcgcaacggcccggacccaatggctcgcgagtgatcaagaaaaggtcatctgtcccgcgtctaggtgacggtctcatctcgctttttgctacaatcgaagacacccactcacaaagccatacacgtacgccagacttgtcgtctcgtgatctcccatgtgcttcaccccttccatctgcaccgggtgtgcaagacacgccagagaatagacatgcagatgtggccagcacattccatcagtctgatgttaacaatcagaccgctagccatgccctacctagccacatcaacagcaaagagatcgatttcaatccaagcgatgatgagctgcccctgttgtctggcagcgatgccacatctgatgatgagactgccgtcgaatcccaattcttgagctctaccaggaacactccccttgccaccgcagagacgacgccttcttcaggattcgcccacacagctccagaactattttcctcgcccacgccagacatcaaggtaaagctgacaacgatcaacaaacaagatgtgaaacatgcaacacaacagtcaattccccgactagctgataaattgccagagtcggtggatatgtcttcatgcagccaagacgtaccgagctccgttgttgttgatgaccagcttgtcactgatgttgactcccttcgtgatattatcaagggtttcctcacatcggtcgctcgaccagcaactggttcctcagctgctacgtgtcaccagccgccgagtgcgagcaagtcattctgcttctggtccccagagagaattgtcgagttctacaatagcgggaaaatcaccctggagagagcccaaaagacggcaaagacacacagcttcaccgagctgtacgcctctcttcaaggactccaagaagcatctgttacagctgatcagactacaatgcagaccgagaaggtggccgacttccagtctctcgacgtgactgcatctgcttttcccagtccgagctcgtctcttgactaccaagaagccatgcgtacttatcacgatgctgtatggcaggccttcgagaacaagcgtcacaatcatagtgtacgagatcatgccgacgattgtgtacgtcctttgcatattttcgtggatatgtcaaacatattcattggattctgtgactcttggaagatatcacagaacattccgctatctcggaacatacgagctccgaaatttaacttcaagatcttcacttccatcttggaacgtagccgcgccgtcgagaagaaggtccttgcaggctctgtatccacgaccaccgacaaatcgcggtggcctgcacacttgtatgaggcacatgcccaaggatacaagatgaatgtcttgaatcgtgttcagaagttagcgcccatcaaaggcggacgacgacgcaggccatcgccatccggtccccatgctggacagtctgatggtgtcactagcggtgatgagtcgactgaagaccaggcgacaatgggctacgagaccaagaatggtgagcaagcagtggatgagattctccatctgaaaatgatggacagcgtggtcgacttcatgtcaaatcctgcaacgattgttcttgccactggagacgccgcagaggctgagttctccgatggcttcttgcaatacgccattcgcgcccttgagaacgggtggaacctcgagcttgtcacatggaagcgagctatttcttctgcctggaagaatcaggagctcagcaagaagtatggccggcgcttccggattatttacctagacgaattccttgacgagctgaatgctgatgtttgtttcacgttggcctaaggctcaggccgtctgggaggctagtcctgcaaaaatggatgacccttgtcgctgctgggcactgatgagtgttgtggtagcaagcacacttttcggttgcttggtggccagcctacttggtctctcctctcgacgcagacatcgatcacagtgacacttcattgcagtcacctcgtgctcgccttgtttgttttccttgctgctttgttgcacgacggcacagcggtctttatctattgcggccatgacctggttccatgtgtcagtgactcgatgaccgcaaattgcagctcggtctgcttcatacatgatagcatcccaccaactatgacgagccttcgtagttggcaacaatgtcttcttatcttgagtgcgatatcagcacagctggccgtggaattcggcttggtaggatgaggttgaggatatttttacgacgctatgccgacttacgaactttgatctgaggatataccagagaatttggggggtgcatcggtggtttttcttttctgcatatgcctgcggctttactttctgttccgcattccgggcgcacttttgtaatgatgcatctggttttatagatacccatcggcactgtcggcgtttgcacattctgtattcatctttctgtggcagaattgcatacaaggatggcatggaaaggaccgaaaggaactggaaataagtaggactcatagcgaaatcttaggcctaaccgtcagtcataggctatatatatacgatgcatggtcaatttagatctgtctgttactctgtctattgcgaattaccggtggtgctttgtagggttgccgaagaaatctcgcagtgacatagaattgtgagacatagtgttctatattttctgaccccgaagcctattgagctctatgaaacacgggttccattcaaatctatgtccacctgatgttttacagcctccctcaccttctcccacgagttctccacgtggatgacgcgcctctccctctggagcaagtctctgaactcggcaggtagtacttgctcgtcaaagctgaagtcttgctctccgctaagtgccgactctacggcgcccgagaacttggctggatgagcggtcgacagggagatatgatgtacactaccgcctgttctggagattgatctcgtagccgcggccactcccacggcggtgtgagggtcgagaacatatttatttttgccgtagcaagcctggatggtctccaacgtctctgcgtcgctcacgcgctcgctttcgaaggtctcgcgaccagtcttcatcatatccgggtgcacaggtccaaagccgcctgtggttttcagtgactgataccatgcggtgacttcctgaccagcctgcttcttgtcaaactgctcatccatacccaccgtggatgcgaaacctacgggaactgttcagtatcgtactgggtgagagggcaagcggtagtgtcgtaccttcggccatgaaccacatgagtcgttcgaaattactagataccaaaatatccatcgctggacttaaggtttccttgcatccatcgctatgcactggcttctcgccggcatccccattgctgacgggttgcttctcataacggccagtttgccagaaacggtacagaatgtcgtttctg

SEQ ID NO: 39869 - DNA, 2955 bp, Muscodor strobelii
  misc_feature: SGI cDNA ID NO. 573886
  misc_feature: Reduced expression when VOC is produced
  misc_feature: Encodes the peptide sequence at SEQ ID NO 39870
atggccgatcaagctatgggcaccaccggcgcttctgccgcagctgcgtccataccgcagaacgccgcgccgtcatccggagatgccatggacgtcgacgtcctagacaaccacgccaacccccctccgccgcgctccgaagcccagctccctcgcgacgccgcccagcccaacccagaccacaacgcccatcgcgacgcccatcgtgacgcccatcaggaccctgataatggcggtgccgacgctgacggcgacgacgatgccgatgccgatgtcgatgccgatgcagacgctgacgtagacgctgacgccgacatagatgttgatgcggacggcgagcctgaggagtcctcacaggtgccggaccgcctcgacaacgacatgttgaatgtcatcgagaatgtcgccaactacctgaccgcctacaaggatgccgacggctaccacatagcctcgcacttccagcgcatccctaaccgccgcctcatccccgactaccacgaggtcatcaaggagcccatcgctttcagcaccatccgaaccaagaaactcaagaagcagtacgccgccttccccgagtttgtcagggacgtcgccctcatcagccacaacgcccaagtctacaaccgctcctcctcccaggtcttcaaggacgccctccgcctgcgcgaggtcttccaggaggagcttcagaagctgatcgatgacgacaccatcaccccggacgacgccctgctgcccgacctcggcgagatccccgaggccgaggacgactcacccgacgaccaggaggacgaggacatggaagaggaggaagaggaggatgacgaggacgaggacgaggactcttctgacagcgacgacagccgccggcgcgggaggcgcaggcgtcgcggcgcccgcaagtccgactcgcgcgacaccgccctgcagacgagacgtggtcgcccgcccaaggtcttcacccccgtcgaggctcgcatccacagcctcctcaagggtctccgcaagctgaagcgcgccgagggcgacctcttgatctatgccttcgagaggcttcccgacaaggccagcaaccccgactactacaccaccatcgcgaaccccatggcgctcaacatcatcaagagaaagtgcaagagcaagaagtaccagaacgtggaccaggccatgctggacatcaacctcatgttcaacaacgccaaggagtacaacatcgaatccagccagatataccaggacgccgagcagctgcaggcctacgcccaagacctcgccgagcaggagaaagggaagcccgacaacgagttcgaggacgaggagggccgccgccccatccccgagatccgccacaacggcgagatctggcgagtgggcgactgggttcacatcaccaacaccaacgacctggcaaagcccattcctgcgcagatctacaggacgtggcaggatcggcagggccagaattgggtgaatgcctgctggtactaccgccccgagcagacggtgcaccgtttcgacaggcacttcttcgaaaatgaggtggtcaagacggggcagtaccgcgatcaccgcattgacgaggtcgtggatcgctgcttcgtcatgtttgtgacccgctacgataaaggccggccgagaggactcgccaaggacaaggacgtctacatctgcaagtcgcgttacaacgaagagaaccacaagctgaacaagatcaagacctggtcaagctgcctacctgacgaggtgcgtgacagggactacgagatggatctatttgaagtgccgaggggtctcaagaagattccgagtccaataaaacatctccttcgctacgatgcgaagtccacagatccccttcccaaaccgatctggggccaacccaacgcgccgccgctggttggagccgtacattgccgtgaaagagagcctaatgaatctccgccaccagagcccatatcctcccttggccaagcgcatgtcgacccagtccgccggccgtccatgatgcagacgccacggccggttgacgctcatggagacatgagcatgggaaacacgggccacttctcaacgatgccgtctcaggcatcgcccgccaatggtcatgccacaccaccttatgctcctcactacgcacccccgcggcccagcgctactccagtccccgtcccgcagtacggggctcacacttaccagggcggccatgcggcagcatcaccgcatgtgaaccagatgccaccccagcctgctccacattaccaggcgcatccgcctcagccactccatcaaccgcaccacactccggctccgccctacaatgggtactcgtcacactacaatacgacaccggggcccatgcctcaccaaccccatcatgctccgcatcagtcgagcaaccccgcggtcggatatgatccgtcgcaacgacttgccccatcgccagcgcgcatgtcgaccggtccggcgccggctccaagctccggaaattcgtacacacaaggcaatgcctatcatcccccacgccccgtcgaggtgtacaggctagatgacgccacagatgccagcatccccggtgaagtccgcgatcagttcctgcgagatgaggccggccacgtcctctttttcacgcagcctccgcttgacaggccacatcgtggcatttcgcaagagagtgcgaacctagggcacagcgtccggtatctcgcggaccgcgcacgagagcgggaagaccgacgagcgaagcgcaaggcgagagacgagtcacgccaagtagatgagagcaaacggatagctatggagcgtgaagctacgcaaggagcaaaaaaggcgcagatagacgacgcagccaagacgctgctcgggtggtcgcaaagcattcaagacgaagcggactccctcatggtcagctactcgggctggagtgtccgggaaagggatctgactaagacctaa

SEQ ID NO: 39870 - protein, 984 aa, Muscodor strobelii
  misc_feature: SGI Peptide ID NO. 573886
  misc_feature (454)..(573): Pfam Id: PF01426 Pfam Desc: BAH domain
  misc_feature (328)..(417): Pfam Id: PF00439 Pfam Desc: Bromodomain
  misc_feature (128)..(221): Pfam Id: PF00439 Pfam Desc: Bromodomain
  misc_feature (77)..(983): NCBI GI: 46127173 Blast Desc: FG07964.1 [Gibberella zeae PH-1]
  misc_feature (81)..(958): NCBI GI: 256721647 Blast Desc: NECHADRAFT_37495 [Nectria haematococca mpVI 77-13-4]
  misc_feature (122)..(973): NCBI GI: 154293911 Blast Desc: BC1G_14027 [Botryotinia fuckeliana B05.10] gi|150845182|gb|EDN20375.1| BC1G_14027 [Botryotinia fuckeliana B05.10]
  misc_feature (127)..(973): NCBI GI: 116179512 Blast Desc: CHGG_00384 [Chaetomium globosum CBS 148.51] gi|88184681|gb|EAQ92149.1| CHGG_00384 [Chaetomium globosum CBS 148.51]
  misc_feature (113)..(935): NCBI GI: 156039755 Blast Desc: SS1G_12014 [Sclerotinia sclerotiorum 1980] gi|154697751|gb|EDN97489.1| SS1G_12014 [Sclerotinia sclerotiorum 1980]
  misc_feature (127)..(976): NCBI GI: 145616154 Blast Desc: MGG_13532 [Magnaporthe grisea 70-15] gi|145009907|gb|EDJ94563.1| MGG_13532 [Magnaporthe grisea 70-15]
  misc_feature (111)..(933): NCBI GI: 239613254 Blast Desc: RSC complex subunit RSC1 [Ajellomyces dermatitidis ER-3]
  misc_feature (104)..(929): NCBI GI: 154281219 Blast Desc: conserved [Ajellomyces capsulatus NAm1] gi|150411601|gb|EDN06989.1| conserved [Ajellomyces capsulatus NAm1]
  misc_feature (118)..(957): NCBI GI: 238845819 Blast Desc: chromatin structure-remodeling complex protein RSC1 [Microsporum canis CBS 113480]
  misc_feature (54)..(973): NCBI GI: 242814489 Blast Desc: RSC complex subunit (RSC1), [Talaromyces stipitatus ATCC 10500] gi|218714718|gb|EED14141.1| RSC complex subunit (RSC1), [Talaromyces stipitatus ATCC 10500]
  misc_feature: Useful for introducing or modulating the production of volatile compounds
MADQAMGTTGASAAAASIPQNAAPSSGDAMDVDVLDNHANPPPPRSEAQLPRDAAQPNPDHNAHRDAHRDAHQDPDNGGADADGDDDADADVDADADADVDADADIDVDADGEPEESSQVPDRLDNDMLNVIENVANYLTAYKDADGYHIASHFQRIPNRRLIPDYHEVIKEPIAFSTIRTKKLKKQYAAFPEFVRDVALISHNAQVYNRSSSQVFKDALRLREVFQEELQKLIDDDTITPDDALLPDLGEIPEAEDDSPDDQEDEDMEEEEEEDDEDEDEDSSDSDDSRRRGRRRRRGARKSDSRDTALQTRRGRPPKVFTPVEARIHSLLKGLRKLKRAEGDLLIYAFERLPDKASNPDYYTTIANPMALNIIKRKCKSKKYQNVDQAMLDINLMFNNAKEYNIESSQIYQDAEQLQAYAQDLAEQEKGKPDNEFEDEEGRRPIPEIRHNGEIWRVGDWVHITNTNDLAKPIPAQIYRTWQDRQGQNWVNACWYYRPEQTVHRFDRHFFENEVVKTGQYRDHRIDEVVDRCFVMFVTRYDKGRPRGLAKDKDVYICKSRYNEENHKLNKIKTWSSCLPDEVRDRDYEMDLFEVPRGLKKIPSPIKHLLRYDAKSTDPLPKPIWGQPNAPPLVGAVHCREREPNESPPPEPISSLGQAHVDPVRRPSMMQTPRPVDAHGDMSMGNTGHFSTMPSQASPANGHATPPYAPHYAPPRPSATPVPVPQYGAHTYQGGHAAASPHVNQMPPQPAPHYQAHPPQPLHQPHHTPAPPYNGYSSHYNTTPGPMPHQPHHAPHQSSNPAVGYDPSQRLAPSPARMSTGPAPAPSSGNSYTQGNAYHPPRPVEVYRLDDATDASIPGEVRDQFLRDEAGHVLFFTQPPLDRPHRGISQESANLGHSVRYLADRAREREDRRAKRKARDESRQVDESKRIAMEREATQGAKKAQIDDAAKTLLGWSQSIQDEADSLMVSYSGWSVRERDLTKT

SEQ ID NO: 39871 - DNA, 4838 bp, Muscodor strobelii
  misc_feature: SGI EST ID NO. CUFF.96972.2
  misc_feature: Variant of the nucleotide sequence at SEQ ID NO 39869
ctttaagcacatacctatactagaacctgattcgggtacagctacctttaagctatcgtcgttgagaagcataccagaagccagcctctggtcgggcaagctgggtggcgtggggggagcgttgccggactggtcatcttggccggaccgttcggcagcaatggtgagaatctctcgttggaggccaagcgcacgaacggtggtcgcgttgaggtcagcggcgagagtttgcagcggccaaccaaacttaacagtgatatcctgacagtcgatttcggacctgatgcgctcgacgagctcgaggacggtagcatcatcgtcgagctctatggaccccgcgccgctgggcgcccgatagcgaactttcatagtggtagtgaggttggttgcgaatacatgtaattattcttgaaagcgccgttgaaactacgtttaggagatgctgtggttagatgcgccgtggtgtggtaggtgaaagagatcagttttggttggcgctggtaagtgaactatagaatgcctaggttttttaggactactaccggcagagagaacagattaacgagaagatcatgagacggttagggaaagaacgaaaatcgatcagtgtgaaggacgcgatgggcgatttgggttgcaaatgttaaagctcaggtacaggcagatgggaaggggtaagtaatagtcgttgatgacctagcgttcgggaaggttcggtggataagatacgagggagagacgtgtggcaataatatgcatacaggtggtgaagcagaaaggggggatagtattgagagggtgacagaggagaatgttggtgttgtctcagcaataaaaatggtagggaccgcatctggtatacatcttgatggagtgggagttatcagaactgggtatgagtgaggcatgtaatggtcgcggcatctaagtcacaattggagatggcctcggtttgtacgcaagtggcatgtctatagacctaattcgtgcatgaggtgtataattgcaacttaattttcatcaggaatacaaaatatacgtgtcagagaactgatctatgaactcgattacctaaacgcagcatgagttggagcagtaaaatgacgtgagttaagaggtgaagatggatcaagaggcagacgaccggtgcgaatggtctgtgcggagtgtgcatcgcgtgtcgtggcgtaggaaggtaccttcggtaggtacatgcgcacgacgtgccttggcggctgttgagtctggttgcatcgcgtcgccagcttttgtttgcgcacttcgctcgctactacaccctttcacgtctgaggccatctccagtgtcttgcttaattgatcaggatagagcattaactactccgccacggcgcacgcttcatttgtcgactctgtagggacagtgtaggatagtgtcgggtagcgcacgagagtgctggggctcgctctcccagcgtctctagccaacaaactgccagcaaaccaggcatcatggccgatcaagctatgggcaccaccggcgcttctgccgcagctgcgtccataccgcagaacgccgcgccgtcatccggagatgccatggacgtcgacgtcctagacaaccacgccaacccccctccgccgcgctccgaagcccagctccctcgcgacgccgcccagcccaacccagaccacaacgcccatcgcgacgcccatcgtgacgcccatcaggaccctgataatggcggtgccgacgctgacggcgacgacgatgccgatgccgatgtcgatgccgatgcagacgctgacgtagacgctgacgccgacatagatgttgatgcggacggcgagcctgaggagtcctcacaggtgccggaccgcctcgacaacgacatgttgaatgtcatcgagaatgtcgccaactacctgaccgcctacaaggatgccgacggctaccacatagcctcgcacttccagcgcatccctaaccgccgcctcatccccgactaccacgaggtcatcaaggagcccatcgctttcagcaccatccgaaccaagaaactcaagaagcagtacgccgccttccccgagtttgtcagggacgtcgccctcatcagccacaacgcccaagtctacaaccgctcctcctcccaggtcttcaaggacgccctccgcctgcgcgaggtcttccaggaggagcttcagaagctgatcgatgacgacaccatcaccccggacgacgccctgctgcccgacctcggcgagatccccgaggccgaggacgactcacccgacgaccaggaggacgaggacatggaagaggaggaagaggaggatgacgaggacgaggacgaggactcttctgacagcgacgacagccgccggcgcgggaggcgcaggcgtcgcggcgcccgcaagtccgactcgcgcgacaccgccctgcagacgagacgtggtcgcccgcccaaggtcttcacccccgtcgaggctcgcatccacagcctcctcaagggtctccgcaagctgaagcgcgccgagggcgacctcttgatctatgccttcgagaggcttcccgacaaggccagcaaccccgactactacaccaccatcgcgaaccccatggcgctcaacatcatcaagagaaagtgcaagagcaagaagtaccagaacgtggaccaggccatgctggacatcaacctcatgttcaacaacgccaaggagtacaacatcgaatccagccagatataccaggacgccgagcagctgcaggcctacgcccaagacctcgccgagcaggagaaagggaagcccgacaacgagttcgaggacgaggagggccgccgccccatccccgagatccgccacaacggcgagatctggcgagtgggcgactgggttcacatcaccaacaccaacgacctggcaaagcccattcctgcgcagatctacaggacgtggcaggatcggcagggccagaattgggtgaatgcctgctggtactaccgccccgagcagacggtgcaccgtttcgacaggcacttcttcgaaaatgaggtggtcaagacggggcagtaccgcgatcaccgcattgacgaggtcgtggatcgctgcttcgtcatgtttgtgacccgctacgataaaggccggccgagaggactcgccaaggacaaggacgtctacatctgcaagtcgcgttacaacgaagagaaccacaagctgaacaagatcaagacctggtcaagctgcctacctgacgaggtgcgtgacagggactacgagatggatctatttgaagtgccgaggggtctcaagaagattccgagtccaataaaacatctccttcgctacgatgcgaagtccacagatccccttcccaaaccgatctggggccaacccaacgcgccgccgctggttggagccgtacattgccgtgaaagagagcctaatgaatctccgccaccagagcccatatcctcccttggccaagcgcatgtcgacccagtccgccggccgtccatgatgcagacgccacggccggttgacgctcatggagacatgagcatgggaaacacgggccacttctcaacgatgccgtctcaggcatcgcccgccaatggtcatgccacaccaccttatgctcctcactacgcacccccgcggcccagcgctactccagtccccgtcccgcagtacggggctcacacttaccagggcggccatgcggcagcatcaccgcatgtgaaccagatgccaccccagcctgctccacattaccaggcgcatccgcctcagccactccatcaaccgcaccacactccggctccgccctacaatgggtactcgtcacactacaatacgacaccggggcccatgcctcaccaaccccatcatgctccgcatcagtcgagcaaccccgcggtcggatatgatccgtcgcaacgacttgccccatcgccagcgcgcatgtcgaccggtccggcgccggctccaagctccggaaattcgtacacacaaggcaatgcctatcatcccccacgccccgtcgaggtgtacaggctagatgacgccacagatgccagcatccccggtgaagtccgcgatcagttcctgcgagatgaggccggccacgtcctctttttcacgcagcctccgcttgacaggccacatcgtggcatttcgcaagagagtgcgaacctagggcacagcgtccggtatctcgcggaccgcgcacgagagcgggaagaccgacgagcgaagcgcaaggcgagagacgagtcacgccaagtagatgagagcaaacggatagctatggagcgtgaagctacgcaaggagcaaaaaaggcgcagatagacgacgcagccaagacgctgctcgggtggtcgcaaagcattcaagacgaagcggactccctcatggtcagctactcgggctggagtgtccgggaaagggatctgactaagacctaaagatcttaaagggatccggacagaatgaagaggactggatgatgcgtgccatatacttgcatggctgctactactgctactattaaggcttgcgggtgtttagggatgggattgtacaagtactcatgaggatatcacgtctatcgcggctgcaaggaagtggagtttttcattccatgatggcttaattcatgttcagccccctggtatttcaacaagatagagtggtccagcaattgttgagatgggcgtgtgttacctatgagagtggtcggtcgctttgatcaccttcgtattgcacaatgatcaagaataattaatttgcaacgaacatgaatgcctagcccacctggccttgaccccaagcttagcagcattctgcttcattttgc

SEQ ID NO: 39872 - DNA, 504 bp, Muscodor strobelii
  misc_feature: SGI cDNA ID NO. 573887
  misc_feature: Encodes the peptide sequence at SEQ ID NO 39873
atgtcgaccggtccggcgccggctccaagctccggaaattcgtacacacaaggcaatgcctatcatcccccacgccccgtcgaggtgtacaggctagatgacgccacagatgccagcatccccggtgaagtccgcgatcagttcctgcgagatgaggccggccacgtcctctttttcacgcagcctccgcttgacaggccacatcgtggcatttcgcaagagagtgcgaacctagggcacagcgtccggtatctcgcggaccgcgcacgagagcgggaagaccgacgagcgaagcgcaaggcgagagacgagtcacgccaagtagatgagagcaaacggatagctatggagcgtgaagctacgcaaggagcaaaaaaggcgcagatagacgacgcagccaagacgctgctcgggtggtcgcaaagcattcaagacgaagcggactccctcatggtcagctactcgggctggagtgtccgggaaagggatctgactaagacctaa

SEQ ID NO: 39873 - protein, 167 aa, Muscodor strobelii
  misc_feature: SGI Peptide ID NO. 573887
  misc_feature (8)..(139): NCBI GI: 46127173 Blast Desc: FG07964.1 [Gibberella zeae PH-1]
  misc_feature (8)..(141): NCBI GI: 256721647 Blast Desc: NECHADRAFT_37495 [Nectria haematococca mpVI 77-13-4]
  misc_feature (1)..(107): NCBI GI: 145616154 Blast Desc: MGG_13532 [Magnaporthe grisea 70-15] gi|145009907|gb|EDJ94563.1| MGG_13532 [Magnaporthe grisea 70-15]
  misc_feature (19)..(156): NCBI GI: 154293911 Blast Desc: BC1G_14027 [Botryotinia fuckeliana B05.10] gi|150845182|gb|EDN20375.1| BC1G_14027 [Botryotinia fuckeliana B05.10]
  misc_feature (1)..(150): NCBI GI: 27803071 Blast Desc: protein product [Podospora anserina]
  misc_feature (1)..(157): NCBI GI: 189091922 Blast Desc: [Podospora anserina] gi|188219314|emb|CAP49294.1| protein product [Podospora anserina]
  misc_feature (18)..(143): NCBI GI: 116179512 Blast Desc: CHGG_00384 [Chaetomium globosum CBS 148.51] gi|88184681|gb|EAQ92149.1| CHGG_00384 [Chaetomium globosum CBS 148.51]
  misc_feature (10)..(118): NCBI GI: 156039755 Blast Desc: SS1G_12014 [Sclerotinia sclerotiorum 1980] gi|154697751|gb|EDN97489.1| SS1G_12014 [Sclerotinia sclerotiorum 1980]
  misc_feature (5)..(131): NCBI GI: 169617628 Blast Desc: SNOG_11997 [Phaeosphaeria nodorum SN15] gi|111059289|gb|EAT80409.1| SNOG_11997 [Phaeosphaeria nodorum SN15]
  misc_feature (9)..(116): NCBI GI: 239613254 Blast Desc: RSC complex subunit RSC1 [Ajellomyces dermatitidis ER-3]
MSTGPAPAPSSGNSYTQGNAYHPPRPVEVYRLDDATDASIPGEVRDQFLRDEAGHVLFFTQPPLDRPHRGISQESANLGHSVRYLADRAREREDRRAKRKARDESRQVDESKRIAMEREATQGAKKAQIDDAAKTLLGWSQSIQDEADSLMVSYSGWSVRERDLTKT

SEQ ID NO: 39874 - DNA, 4838 bp, Muscodor strobelii; identical to SEQ ID NO: 39871
  misc_feature: SGI EST ID NO. CUFF.96972.2
  misc_feature: Variant of the nucleotide sequence at SEQ ID NO 39872

SEQ ID NO: 39875 - DNA, 996 bp, Muscodor strobelii
  misc_feature: SGI cDNA ID NO. 573888
  misc_feature: Reduced expression when VOC is produced
  misc_feature: Encodes the peptide sequence at SEQ ID NO 39876
atgaaagttcgctatcgggcgcccagcggcgcggggtccatagagctcgacgatgatgctaccgtcctcgagctcgtcgagcgcatcaggtccgaaatcgactgtcaggatatcactgttaagtttggttggccgctgcaaactctcgccgctgacctcaacgcgaccaccgttcgtgcgcttggcctccaacgagagattctcaccattgctgccgaacggtccggccaagatgaccagtccggcaacgctccccccacgccacccagcttgcccgaccagaggctggcttctggtatgcttctcaacgacgatagcttaaaggtagctgtacccgaatcaggttctagtatagttctgcgggtgatgccggatgagtgtggtgactgtatgttcacggccgtgagtggtgcattgcacggtttgttacacccagccggatcggcggactataccccagcgaccttgcgccgaatagtcaccgatcacatccgagctaatcctgtggacttcaacgccattaccttagaaaaggaccccgcggcgtactgccagaacatgctccgtcccggcgtatggggcggagcgatcgaactcagaatcctagccgaggtctttcgcttagaaatatgcaccattgacatcgccaacgggagccagtacacattcggcgagcagaataactacgaccagttttgcataatagcctattcgggcattcactatgaccgggttgccgaagtgcttttcgaagggcaggacaacctggtagacttcgacgtaacgcggtggagcacgatgggtaacgaccacatactccgcgccgccaagaatctatgcaagagactgcgagatcagcactactacacagacacgaataacttcattgttacgtgtaactcctgtggagagctcatacagggtgaaagggccgtgaccgagcacgctcggaaaactggccattcaggggtgacagaagttcaaggtttggattga

SEQ ID NO: 39876 - protein, 331 aa, Muscodor strobelii
  misc_feature: SGI Peptide ID NO. 573888
  misc_feature (125)..(242): Pfam Id: PF02338 Pfam Desc: OTU-like cysteine protease
  misc_feature (128)..(242): Pfam Id: PF02338 Pfam Desc: OTU-like cysteine protease
  misc_feature (1)..(331): NCBI GI: 116179516 Blast Desc: CHGG_00386 [Chaetomium globosum CBS 148.51] gi|88184683|gb|EAQ92151.1| CHGG_00386 [Chaetomium globosum CBS 148.51]
  misc_feature (1)..(327): NCBI GI: 189091920 Blast Desc: [Podospora anserina] gi|188219313|emb|CAP49293.1| protein product [Podospora anserina]
  misc_feature (1)..(321): NCBI GI: 255945157 Blast Desc: Pc20g08230 [Penicillium chrysogenum Wisconsin 54-1255] gi|211588081|emb|CAP86152.1| Pc20g08230 [Penicillium chrysogenum Wisconsin 54-1255]
  misc_feature (1)..(321): NCBI GI: 115402979 Blast Desc: conserved [Aspergillus terreus NIH2624] gi|114189412|gb|EAU31112.1| conserved [Aspergillus terreus NIH2624]
  misc_feature (1)..(321): NCBI GI: 121704632 Blast Desc: OTU-like cysteine protease, [Aspergillus clavatus NRRL 1] gi|119398725|gb|EAW09153.1| OTU-like cysteine protease, [Aspergillus clavatus NRRL 1]
  misc_feature (1)..(321): NCBI GI: 258566521 Blast Desc: conserved [Uncinocarpus reesii 1704] gi|237907706|gb|EEP82107.1| conserved [Uncinocarpus reesii 1704]
  misc_feature (1)..(327): NCBI GI: 156039757 Blast Desc: SS1G_12015 [Sclerotinia sclerotiorum 1980] gi|154697752|gb|EDN97490.1| SS1G_12015 [Sclerotinia sclerotiorum 1980]
  misc_feature (1)..(328): NCBI GI: 85093866 Blast Desc: NCU02353 [Neurospora crassa OR74A] gi|28921228|gb|EAA30538.1| conserved [Neurospora crassa OR74A]
  misc_feature (1)..(327): NCBI GI: 27803070 Blast Desc: protein product [Podospora anserina]
  misc_feature (1)..(321): NCBI GI: 119493400 Blast Desc: OTU-like cysteine protease, [Neosartorya fischeri NRRL 181] gi|119412050|gb|EAW21993.1| OTU-like cysteine protease, [Neosartorya fischeri NRRL 181]
  misc_feature: Useful for introducing or modulating the production of volatile compounds
MKVRYRAPSGAGSIELDDDATVLELVERIRSEIDCQDITVKFGWPLQTLAADLNATTVRALGLQREILTIAAERSGQDDQSGNAPPTPPSLPDQRLASGMLLNDDSLKVAVPESGSSIVLRVMPDECGDCMFTAVSGALHGLLHPAGSADYTPATLRRIVTDHIRANPVDFNAITLEKDPAAYCQNMLRPGVWGGAIELRILAEVFRLEICTIDIANGSQYTFGEQNNYDQFCIIAYSGIHYDRVAEVLFEGQDNLVDFDVTRWSTMGNDHILRAAKNLCKRLRDQHYYTDTNNFIVTCNSCGELIQGERAVTEHARKTGHSGVTEVQGLD

SEQ ID NO: 39877 - DNA, 9617 bp, Muscodor strobelii
  misc_feature: SGI EST ID NO. CUFF.96971.0
  misc_feature: Variant of the nucleotide sequence at SEQ ID NO 39875
gcaaaatgaagcagaatgctgctaagcttggggtcaaggccaggtgggctaggcattcatgttcgttgcaaattaattattcttgatcattgtgcaatacgaaggtgatcaaagcgaccgaccactctcataggtaacacacgcccatctcaacaattgctggaccactctatcttgttgaaataccagggggctgaacatgaattaagccatcatggaatgaaaaactccacttccttgcagccgcgatagacgtgatatcctcatgagtacttgtacaatcccatccctaaacacccgcaagccttaatagtagcagtagtagcagccatgcaagtatatggcacgcatcatccagtcctcttcattctgtccggatccctttaagatctttaggtcttagtcagatccctttcccggacactccagcccgagtagctgaccatgagggagtccgcttcgtcttgaatgctttgcgaccacccgagcagcgtcttggctgcgtcgtctatctgcgccttttttgctccttgcgtagcttcacgctccatagctatccgtttgctctcatctacttggcgtgactcgtctctcgccttgcgcttcgctcgtcggtcttcccgctctcgtgcgcggtccgcgagataccggacgctgtgccctaggttcgcactctcttgcgaaatgccacgatgtggcctgtcaagcggaggctgcgtgaaaaagaggacgtggccggcctcatctcgcaggaactgatcgcggacttcaccggggatgctggcatctgtggcgtcatctagcctgtacacctcgacggggcgtgggggatgataggcattgccttgtgtgtacgaatttccggagcttggagccggcgccggaccggtcgacatgcgcgctggcgatggggcaagtcgttgcgacggatcatatccgaccgcggggttgctcgactgatgcggagcatgatggggttggtgaggcatgggccccggtgtcgtattgtagtgtgacgagtacccattgtagggcggagccggagtgtggtgcggttgatggagtggctgaggcggatgcgcctggtaatgtggagcaggctggggtggcatctggttcacatgcggtgatgctgccgcatggccgccctggtaagtgtgagccccgtactgcgggacggggactggagtagcgctgggccgcgggggtgcgtagtgaggagcataaggtggtgtggcatgaccattggcgggcgatgcctgagacggcatcgttgagaagtggcccgtgtttcccatgctcatgtctccatgagcgtcaaccggccgtggcgtctgcatcatggacggccggcggactgggtcgacatgcgcttggccaagggaggatatgggctctggtggcggagattcctgcaaaaacgccatcggtgagtatcgattagagtatacagataaccgataaggtgcattcattgaacacaggaactaagaggattgaatgaggcacaaataatgaagagaagtgcatgggccagtcaagagtagattcaatttcttggtagctgttatgatgaagggtacaagggcagaaggggtgagaaaacaggctgctgagcaacgatgtttgtctcttgcgatacaatcgccaactaaagacacagatgcaaggaggaaaccaggcagcgcgcggtcaatggaatagatgaggctacttacattaggctctctttcacggcaatgtacggctccaaccagcggcggcgcgttgggttggccccagatcggtttgggaaggggatctgtggacttcgcatcgtagcgaaggagatgttttattggactcggaatcttcttgagacccctcggcacttcaaatagatccatctcgtagtccctgtcacgcacctcgtcaggtaggcagcttgaccaggtcttgatcttgttcagcttgtggttctcttcgttgtaacgcgacttgcagatgtagacgtccttgtccttggcgagtcctctcggccggcctttatcgtagcgggtcacaaacatgacgaagcagcgatccacgacctcgtcaatgcggtgatcgcggtactgccccgtcttgaccacctcattttcgaagaagtgcctgtcgaaacggtgcaccgtctgctcggggcggtagtaccagcaggcattcacccaattctggccctgccgatcctgccacgtcctgtagatctgcgcaggaatgggctttgccaggtcgttggtgttggtgatgtgaacccagtcgcctagggggctcggggtcagcgtcgtggcgcgctctcatgcgcaagcagagacggaggggacgagatacttacccactcgccagatctcgccgttgtggcggatctcggggatggggcggcggccctcctcgtcctcgaactcgttgtcgggcttccctttctcctgctcggcgaggtcttgggcgtaggcctgcagctgctcggcgtcctggtatatctggctggattcgatgttgtactccttggcgttgttgaacatgaggttgatgtccagcatggcctggtccacgttctggtacttcttgctcttgcactttctcttgatgatgttgagcgccatggggttcgcgatggtggtgtagtagtcggggttgctggccttgtcgggaagcctctcgaaggcatagatcaagaggtcgccctcggcgcgcttcagcttgcggagacccttgaggaggctgtggatgcgagcctcgacgggggtgaagaccttgggcgggcgaccacgtctcgtctgcagggcggtgtcgcgcgagtcggacttgcgggcgccgcgacgcctgcgcctcccgcgccggcggctgtcgtcgctgtcagaagagtcctcgtcctcgtcctcgtcatcctcctcttcctcctcttccatgtcctcgtcctcctggtcgtcgggtgagtcgtcctcggcctcggggatctcgccgaggtcgggcagcagggcgtcgtccggggtgatggtgtcgtcatcgatcagcttctgaagctcctcctggaagacctcgcgcaggcggagggcgtccttgaagacctgggaggaggagcggttgtagacttgggcgttgtggctgatgagggcgacgtccctgacaaactcggggaaggcggcgtactgcttcttgagtttcttggtctggggggagcgcggcggccgtcagctcggctcttgcggcgtcatgcagacccgacgcagaatgtggcagcgagagcggacttactcggatggtgctgaaagcgatgggctccttgatgacctcgtggtagtcggggatgaggcggcggttagggatgcgctggaagtgcgaggctatgtggtagccgctgcgcaggggcagggcatcagcgacttggaagtccatgcggcaggggaggtatcatgggcatggcgactcactcggcatccttgtaggcggtcaggtagttggcgacattctcgatgacattcaacatgtcgttgtcgaggcggtccggcacctgtgaggactcctcaggctcgccgtccgcatcaacatctatgtcggcgtcagcgtctacgtcagcgtctgcatcggcatcgacatcggcatcggcatcgtcgtcgccgtcagcgtcggcaccgccattatcagggtcctgatgggcgtcacgatgggcgtcgcgatgggcgttgtggtctgggttgggctgggcggcgtcgcgagggagctgggcttcggagcgcggcggaggggggttggcgtggttgtctaggacgtcgacgtccatggcatctccggatgacggcgcggcgttctgcggtatggacgcagctgcggcagaagcgccggtggtgcccatagcttgatcggccatgatgcctggtttgctggcagtttgttggctagagacgctgggagagcgagccccagcactctcgtgcgctacccgacactatcctacactgtccctacagagtcgacaaatgaagcgtgcgccgtggcggagtagttaatgctctatcctgatcaattaagcaagacactggagatggcctcagacgtgaaagggtgtagtagcgagcgaagtgcgcaaacaaaagctggcgacgcgatgcaaccagactcaacagccgccaaggcacgtcgtgcgcatgtacctaccgaaggtaccttcctacgccacgacacgcgatgcacactccgcacagaccattcgcaccggtcgtctgcctcttgatccatcttcacctcttaactcacgtcattttactgctccaactcatgctgcgtttaggtaatcgagttcatagatcagttctctgacacgtatattttgtattcctgatgaaaattaagttgcaattatacacctcatgcacgaattaggtctatagacatgccacttgcgtacaaaccgaggccatctccaattgtgacttagatgccgcgaccattacatgcctcactcatacccagttctgataactcccactccatcaagatgtataccagatgcggtccctaccatttttattgctgagacaacaccaacattctcctctgtcaccctctcaatactatcccccctttctgcttcaccacctgtatgcatattattgccacacgtctctccctcgtatcttatccaccgaaccttcccgaacgctaggtcatcaacgactattacttaccccttcccatctgcctgtacctgagctttaacatttgcaacccaaatcgcccatcgcgtccttcacactgatcgattttcgttctttccctaaccgtctcatgatcttctcgttaatctgttctctctgccggtagtagtcctaaaaaacctaggcattctatagttcacttaccagcgccaaccaaaactgatctctttcacctaccacaccacggcgcatctaaccacagcatctcctaaacgtagtttcaacggcgctttcaagaataattacatgtattcgcaaccaacctcactaccactatgaaagttcgctatcgggcgcccagcggcgcggggtccatagagctcgacgatgatgctaccgtcctcgagctcgtcgagcgcatcaggtccgaaatcgactgtcaggatatcactgttaagtttggttggccgctgcaaactctcgccgctgacctcaacgcgaccaccgttcgtgcgcttggcctccaacgagagattctcaccattgctgccgaacggtccggccaagatgaccagtccggcaacgctccccccacgccacccagcttgcccgaccagaggctggcttctggtatgcttctcaacgacgatagcttaaaggtagctgtacccgaatcaggttctagtatagttctgcgggtgatgccggatgagtgtaagtatccttcgtgtcgatcaaagaacccggccacggccgagaaattcgaaatcatatcaatgccaatccaaaacagtaggaatacgaacacggactaacatgttttgatacactagaagttgtgtatacatcactcaagtttcataatacttaatagatctaccatagtggtgactgtatgttcacggccgtgagtggtgcattgcacggtttgttacacccagccggatcggcggactataccccagcgaccttgcgccgaatagtcaccgatcacatccgagctaatcctgtggacttcaacgccattaccttagaaaaggaccccgcggcgtactgccagaacatgctccgtcccggcgtatggggcggagcgatcgaactcagaatcctagccgaggtctttcgcttagaaatatgcaccattgacatcgccaacgggagccagtacacattcggcgagcagaataactacgaccagttttgcataatagcctattcgggcattcactatgaccgggttgccgaagtgcttttcgaagggcaggacaacctggtagacttcgacgtaacgcggtggagcacgatgggtaacgaccacatactccgcgccgccaagaatctatgcaagagactgcgagatcagcactactacacagacacgaataacttcattgttacgtgtaactcctgtggagagctcatacagggtgaaagggccgtgaccgagcacgctcggaaaactggccattcaggggtgacagaagttcaaggtttggattgaatatgataggagtcttttcgccagaatcgtccgagatgaaccacattccgtcccattttcgcgctactttaggatgaagaactacatctagcgcgacatcagactcccgtaatctgatagacgttacgttcaatatctattttgtgtaatgtcttgtctttgatcatcgtagatgtcagatccgacctctaagagcgagtcggacattcatttcgttggaaggccgaatctctcatgcattgacagaacccggatgcccttctaagctcctggggtcaatggcggagttgagggtgtcatttcagatcatcgcgttgggtattgcatgccatatctatcttcatgctcaaactgagagactatgcgtccgattatgtacatacttgatgtgccatagtatctcctaccatctggagaggtaaatctacgaagggagactcaatacccagtcgagccgagtcgagaacgaatgggcaccgtaaatatctgtctgaaggataagcattgagccggagaatgttcatccctaagatctcttcaacaaagtttatgtatctacatacatctaaactatgaaaacgtaccgaagcgtagtattaagcgaatgttgatcccatcctttaggaggacgtaagtcaacagcgtccgatgaagtacgttacgagagtatagaacagttttacaatcacgctcctttatagctctattccacattgcaataacacaagccagtacatccaagtcacacacttgagctgcaaatatacacacatgcaaatacacctagtacacaagacgccgtccaggtcatgtcctgaagtgaccccagaaccatatgccaagctgacatgctattctcgcgacccaaagaacgatccccagcgtacctcctaatgaggctctgcccgaactccaagatgccatgctgttcattatgttcatttacatcatattagtacaagattagaaggcgagttagtccacctcccagcttccgtgctcatcggaatcagattccgacgggcagagctggcgaggcgtattgatgtgtgttgaggtaccgctatgagctggcccacgggatgccgtggtgtaaaggtagccatcgtcatcacttagattgctaaactcgccgtccgaaaagtaatccctatcagaccacgtcagtcagcgatgctccgtcacggttgcagttttgcctggctagatggcagaggcacagacacggaagccgcgacgggcggaacaactcaccactggaccgggatctgctctccaccttcccccaagccaaatacgagccccctccattcaccggcggcaatcttggcggccaccttgagcatgagattcaccaggtggctgggtgggctcaggagaatctcgaccgtcttttgtacaatagctacgggcaaccgacgaacggctgccagtcggctctgcgatgtttgccggggtggcggagtgaacaagttcgccgccggaggaagcggggatagggcacggcgactgatggacagatggttcggccgaggtcgttgacgcagggaaagtcgctcctccaaggcactcgtgcgaggcgtctgagagctacgtgcgggcatcttatccacgaagttatggagacgagtcggagtagactccgtactcccccaggattcgactaaggagggtgagtttttctccacggatatttgggctctgggcgtcgcgttgcagtccgggtcatcttggctttgcgatggtgattcggcggcgacatcgccttgcgccaacataaaggcgcccatagctggggattcaggccgtgatgatggcggcgagggcggaagcggcgtgataggcgaatgccacgactgtatgctatgaaaagacgccgtagaggcagttggtgattcgtttccagctgcatgaggctgagcgaagtcagatgaaggtggttctctgggcaaaggtcgttcgttactagacttggaagggggtgaggtgatcaaggtcagttgcggaggagcagtaaaagaacgaccagcgagcatacgtgacattcgctttcgtgtgaggtttagcggagcaacattgccggatccttcaaaagaagctgcaggaccgccttcgtctgatgtggattcgggttccggtgtaacagattcgagctccaataacttgtccatgctcctctttccatcctgattcgaagctgggagcaattccgcaggtacaagatcaggagtgagctctggtcttttatcgagctgcgcgtctactatactcgcatgagcactacctggtatggttttcataccgatctctgcatgatgctcttcgatcctcgcctccggtatatcgggcgtcgcagataggtcatgatcccttccagctgtaatttccaagatcgtccgatcatgagaaagggtctctgacaagtctaggtggtgactatggtgagatacttggtcctgttgagaaaatgtcgcttgaaccaacatgggctctgctgaagtcttagatcggggcgaacatcctagtagaggatccgatattcgttccgtgtctacatgttgtgtagaatgtccttgaaaggattcggagggctcgactgctgtctcatctggcacatcgtctctttgaaggtcaccgtgcagcgagtggctgccctcgccctgacctgatgtaactgccccgcaagacaaaagtgcaccatcgtcatgaaatccctccacatgcgccacatgagcgcctatcggctcatcattgccggcaccctctccgttgcctacacttggagcaacagcggggcacggcggcggcggcggcggcggcctgctgatgggcttgggcagttgcgcgggaggagacaagtcggattcgaaggctgaggcaactagatgcttgccctctgctgtccacgccttcttcttgaccggggtggagggcgggtcggggagggcgacgtcaaagctccgctggaaggggcactcggtcttctcgaagaggaggatggtgtcgaagacatggcgcaacagcacggcgcgctcggcatcgtccgggccgcttgcgggcagctcgagacgccagtactgggggcgcctgatctgcaagacgaagcgggaatggtcctgggcgatggaccagcactggctcttggggaggatgggctgcagggccgagccgcagctgaggaaggcgacagagcccggggcgcggtagatgcggaaggggccgacggcaatggtccgctccagccgcgaggaaggcggcaaggtgccggggctggccgtggctgggggacaccgggagggcggtggcggcggtgaaggcgactatcttgacacacggatggttgtacagcgtctcgacaagcgcttcggacgtggacggcggcgagtacgacgagcggcgttgcagagagggctgcaggggggcagccggggcggtgaagactctgc

SEQ ID NO: 39878 - DNA, 2709 bp, Muscodor strobelii
  misc_feature: SGI cDNA ID NO. 573889
  misc_feature: Encodes the peptide sequence at SEQ ID NO 39879
atgtctctcagatcccccatgtcccccaagggattcgtacagttgggcggtacccaaaccaatgataacggcattcctctctcacagatacgcagccacgctagttccacgggtgctcgaaaagccaaccaaggtctgtcacccgagcagaccagcgacgatggcaacgaaaagcatcacttcttccaccgcggccgtagacaagctaaaaaagaagagcacaagaaaaggaaagaagacgaggacgacttggcgaacaatgagctttccctcaatgccatgggcaaaatctacaacaggattattcacacctccgccttgacccgctatgtcatctacatcgctcctgtggctcttctgttagccgtgcccctcatagtcctcacggcattaaacatgaaaaacagcattcctgtcggcaataggacggtcaaaaatggagacaacgagacaaccgtctatggacctcctctattccgactcttcttgtggatcgaagtggcatggttgactttgtgggctggcaagcttggcgcatggtttgtgcctcgcatttttaccttctttaccggagtcgtctctcctgggactcggaagtacgccacagtgctcgtcaacctgtccatccctctgtcacttttcttctgggctctcgcggactggcttgtcttcatcagcttgctccagaaccccttcaaagccgtttcctgggtcaacactgtcaagactgtcctaggggctgcctttgtctcctcggctattttccttatcgagaaatcccttattcaactcatcagcatttcataccatcaacgttctttcgccaatcgtattcaggattccaagcgagatgtgcatcttcttggcttaatgtacgatgcctctcgaaagttgttccctatgtactgcgatgagtttgttgaagaggatgagatcatcaatgatagtattgagatgctgcttggtgggaagaagaaaggatggatgaaccggaaaagcggtgcggtcatgccagctcgactcattggcaacgttggtcgatttggcaataaagtcacctctgcattcggcaacattgccacagagattactggcaagcaggttttcaatcccaactcggcccactcaatcgttattgaagctcttgagaaagttaagacctcggaggctttggccaagcgcatctggatgtcattcgttgtggagggcaacgaagctttgcttggcgatgacattgctgaggttctcggctccgcccaccgagaggaggccgaggagtgctttgctgctatcgatgctgatggcaacggtgatatcagtctcgacgagatgatccgaaaggtggtagagatcggcaaagaaaggaaggccattgcaaacagcatgcaggatatcggtcaggcactgggggtatttgataacatcttgctcgtagtcgttctgctcctcatcgtctttgttttcttggcttttttcaacagttcgtttgtcacaacactcgcgactgctggaactaccctactctcactctcgttcatctttgccacatcggcccaggagttccttggttccacgatattcttgttcatcaaacatccatatgatgttggggatcgcgtggacattactggttctgagaaggagcaacttattgtggagaggatctctctcgtttataccgttttcacgcgcattgacaaaatgcaatcagtgcaagtgcccaacatcgtactgaacaatctctggatcgaaaatgtgtcacgcagtaaggcgatgaaagaactggttcaggtcaacgtctcctacgacacaacatttgaggacatcgaattgctccgtctggaaatggagaaattcgttagatcacccgacaactccagagatttccaacctgatctggccatcagtgtcggcagtattggcaacttagatatgcttacgcttaacgtggctatgaagcataggtcaaactggcataacgacgccacccgagctgcgcggagatctaaattcatgtgtgctctcgcaacagctatgaagaaggtcccgatgtatggccctggtggtggtggcgaggctttgggtggcccgaccaaccctacttattcggttagcgttacagatgagattgcggctgccgctcgcgacaaggctgcccaagaaaaggacgcagctcgtctcgtgcccgccgcctcacagacagctgccagcgagtccgcggcaatgcaaggattcaatacagttgacccggtagtggctgcccaggatgaatttggatctaatcgtgaggagtatacaccgcgcgactcaagaggggcgtcgattgatagaagccgatctacgcgccgctcctacgatcacgggtcctcacgatccgacctgcacaagactgagagtcagcgtggtgggttccgcaaagctggcgagagtctacctcttgatggtcagaacgatactcagctcggaagagcacccagcttccaagtaacccaacatatgaccccattcgatgaggaagcgcaagtaggagggtcaaatccttacgaaacatacttcacagtgccgccatcagcagccaaccagccacagaccacacaaagctcggcgcgggctccctcacatgttacaagtgcgtccggcaatagacatagaggagacagtgtagtgagtggatcgcgcccgcctgtgaatttgggccctcgacgataa

SEQ ID NO: 39879 - protein, 902 aa, Muscodor strobelii
  misc_feature: SGI Peptide ID NO. 573889
  misc_feature (473)..(678): Pfam Id: PF00924 Pfam Desc: Mechanosensitive ion channel
  misc_feature (423)..(451): Pfam Id: PF00036 Pfam Desc: EF hand
  misc_feature (473)..(613): Pfam Id: PF00924 Pfam Desc: Mechanosensitive ion channel
  misc_feature (5)..(847): NCBI GI: 39943852 Blast Desc: MGG_03937 [Magnaporthe grisea 70-15] gi|145014645|gb|EDJ99213.1| MGG_03937 [Magnaporthe grisea 70-15]
  misc_feature (21)..(811): NCBI GI: 261356718 Blast Desc: serine/threonine-protein kinase [Verticillium albo-atrum VaMs.102]
  misc_feature (1)..(877): NCBI GI: 256734643 Blast Desc: [Nectria haematococca mpVI 77-13-4]
  misc_feature (1)..(899): NCBI GI: 171689930 Blast Desc: protein product [Podospora anserina] gi|170944927|emb|CAP71038.1| protein product [Podospora anserina]
  misc_feature (8)..(878): NCBI GI: 46107896 Blast Desc: FG00831.1 [Gibberella zeae PH-1]
  misc_feature (1)..(897): NCBI GI: 116200209 Blast Desc: CHGG_08260 [Chaetomium globosum CBS 148.51] gi|88179539|gb|EAQ87007.1| CHGG_08260 [Chaetomium globosum CBS 148.51]
  misc_feature (23)..(812): NCBI GI: 164422795 Blast Desc: NCU09595 [Neurospora crassa OR74A] gi|157069825|gb|EAA33937.2| conserved [Neurospora crassa OR74A]
  misc_feature (23)..(872): NCBI GI: 28881118 Blast Desc: conserved [Neurospora crassa]
  misc_feature (1)..(830): NCBI GI: 154322821 Blast Desc: BC1G_00753 [Botryotinia fuckeliana B05.10] gi|150848087|gb|EDN23280.1| BC1G_00753 [Botryotinia fuckeliana B05.10]
  misc_feature (23)..(830): NCBI GI: 156064731 Blast Desc: SS1G_00373 [Sclerotinia sclerotiorum 1980] gi|154691235|gb|EDN90973.1| SS1G_00373 [Sclerotinia sclerotiorum 1980]
MSLRSPMSPKGFVQLGGTQTNDNGIPLSQIRSHASSTGARKANQGLSPEQTSDDGNEKHHFFHRGRRQAKKEEHKKRKEDEDDLANNELSLNAMGKIYNRIIHTSALTRYVIYIAPVALLLAVPLIVLTALNMKNSIPVGNRTVKNGDNETTVYGPPLFRLFLWIEVAWLTLWAGKLGAWFVPRIFTFFTGVVSPGTRKYATVLVNLSIPLSLFFWALADWLVFISLLQNPFKAVSWVNTVKTVLGAAFVSSAIFLIEKSLIQLISISYHQRSFANRIQDSKRDVHLLGLMYDASRKLFPMYCDEFVEEDEIINDSIEMLLGGKKKGWMNRKSGAVMPARLIGNVGRFGNKVTSAFGNIATEITGKQVFNPNSAHSIVIEALEKVKTSEALAKRIWMSFVVEGNEALLGDDIAEVLGSAHREEAEECFAAIDADGNGDISLDEMIRKVVEIGKERKAIANSMQDIGQALGVFDNILLVVVLLLIVFVFLAFFNSSFVTTLATAGTTLLSLSFIFATSAQEFLGSTIFLFIKHPYDVGDRVDITGSEKEQLIVERISLVYTVFTRIDKMQSVQVPNIVLNNLWIENVSRSKAMKELVQVNVSYDTTFEDIELLRLEMEKFVRSPDNSRDFQPDLAISVGSIGNLDMLTLNVAMKHRSNWHNDATRAARRSKFMCALATAMKKVPMYGPGGGGEALGGPTNPTYSVSVTDEIAAAARDKAAQEKDAARLVPAASQTAASESAAMQGFNTVDPVVAAQDEFGSNREEYTPRDSRGASIDRSRSTRRSYDHGSSRSDLHKTESQRGGFRKAGESLPLDGQNDTQLGRAPSFQVTQHMTPFDEEAQVGGSNPYETYFTVPPSAANQPQTTQSSARAPSHVTSASGNRHRGDSVVSGSRPPVNLGPRR

SEQ ID NO: 39880 - DNA, 3516 bp, Muscodor strobelii
  misc_feature: SGI EST ID NO. CUFF.96305.0
  misc_feature: Variant of the nucleotide sequence at SEQ ID NO 39878
cggatggttgtgagctgcatgtgcttgtgctcctccacctcgtctttcattttttgttcacatcgactccatctccgacctcgtgtttcgtttcattttcttcccattcattctcccgtcgtacagcagtgcctagtctctcgtttatctgggcgcacattccaccccatctcataccgcatacgaccttccccccgtctatctagatccgtggcgttgtctgccaacgacacagacgtcattctttgcacctctcagtctttcagttgaccgcctggtgcgctcattgtgttaatgcactcgattgtttcctagatttcccattaagcacttagagcccgaaatcacacacaaaagtcggggttcataccgaattcgatcgcccaccagcatttcttacactggaacactgaacgcattcaccatgtctctcagatcccccatgtcccccaagggattcgtacagttgggcggtacccaaaccaatgataacggcattcctctctcacagatacgcagccacgctagttccacgggtgctcgaaaagccaaccaaggtctgtcacccgagcagaccagcgacgatggcaacgaaaagcatcacttcttccaccgcggccgtagacaagctaaaaaagaagagcacaagaaaaggaaagaagacgaggacgacttggcgaacaatgagctttccctcaatgccatgggcaaaatctacaacaggattattcacacctccgccttgacccgctatgtcatctacatcgctcctgtggctcttctgttagccgtgcccctcatagtcctcacggcattaaacatgaaaaacagcattcctgtcggcaataggacggtcaaaaatggagacaacgagacaaccgtctatggacctcctctattccgactcttcttgtggatcgaagtggcatggttgactttgtgggctggcaagcttggcgcatggtttgtgcctcgcatttttaccttctttaccggagtcgtctctcctgggactcggaagtacgccacagtgctcgtcaacctgtccatccctctgtcacttttcttctgggctctcgcggactggcttgtcttcatcagcttgctccagaaccccttcaaagccgtttcctgggtcaacactgtcaagactgtcctaggggctgcctttgtctcctcggctattttccttatcgagaaatcccttattcaactcatcagcatttcataccatcaacgttctttcgccaatcgtattcaggattccaagcgagatgtgcatcttcttggcttaatgtacgatgcctctcgaaagttgttccctatgtactgcgatgagtttgttgaagaggatgagatcatcaatgatagtattgagatgctgcttggtgggaagaagaaaggatggatgaaccggaaaagcggtgcggtcatgccagctcgactcattggcaacgttggtcgatttggcaataaagtcacctctgcattcggcaacattgccacagagattactggcaagcaggttttcaatcccaactcggcccactcaatcgttattgaagctcttgagaaagttaagacctcggaggctttggccaagcgcatctggatgtcattcgttgtggagggcaacgaagctttgcttggcgatgacattgctgaggttctcggctccgcccaccgagaggaggccgaggagtgctttgctgctatcgatgctgatggcaacggtgatatcagtctcgacgagatgatccgaaaggtggtagagatcggcaaagaaaggaaggccattgcaaacagcatgcaggatatcggtcaggcactgggggtatttgataacatcttgctcgtagtcgttctgctcctcatcgtctttgttttcttggcttttttcaacagttcgtttgtcacaacactcgcgactgctggaactaccctactctcactctcgttcatctttgccacatcggcccaggagttccttggttccacgatattcttgttcatcaaacatccatatgatgttggggatcgcgtggacattactggttctgagaaggagcaacttattgtggagaggatctctctcgtttataccgttttcacgcgcattgacaaaatgcaatcagtgcaagtgcccaacatcgtactgaacaatctctggatcgaaaatgtgtcacgcagtaaggcgatgaaagaactggttcaggtcaacgtctcctacgacacaacatttgaggacatcgaattgctccgtctggaaatggagaaattcgttagatcacccgacaactccagagatttccaacctgatctggccatcagtgtcggcagtattggcaacttagatatgcttacgcttaacgtggctatgaagcataggtcaaactggcataacgacgccacccgagctgcgcggagatctaaattcatgtgtgctctcgcaacagctatgaagaaggtcccgatgtatggccctggtggtggtggcgaggctttgggtggcccgaccaaccctacttattcggttagcgttacagatgagattgcggctgccgctcgcgacaaggctgcccaagaaaaggacgcagctcgtctcgtgcccgccgcctcacagacagctgccagcgagtccgcggcaatgcaaggattcaatacagttgacccggtagtggctgcccaggatgaatttggatctaatcgtgaggagtatacaccgcgcgactcaagaggggcgtcgattgatagaagccgatctacgcgccgctcctacgatcacgggtcctcacgatccgacctgcacaagactgagagtcagcgtggtgggttccgcaaagctggcgagagtctacctcttgatggtcagaacgatactcagctcggaagagcacccagcttccaagtaacccaacatatgaccccattcgatgaggaagcgcaagtaggagggtcaaatccttacgaaacatacttcacagtgccgccatcagcagccaaccagccacagaccacacaaagctcggcgcgggctccctcacatgttacaagtgcgtccggcaatagacatagaggagacagtgtagtgagtggatcgcgcccgcctgtgaatttgggccctcgacgataaaattagtcgaggatagatggaaacatctcgccatgttctgatcgattttttgtcttttctctgttctcggaattgcatgcaggcgaaggcggcgttgaaaacatttcaaaatggctttgaggccaggatttgactggcacggcatggaattatggtgcacgagatgcctccaaacggtgttacgcatggctcacttacggtaactatagaaatcaagatgagtagctcttctagctactgagtccgtctagacggtacaggtatgaaacaagcctgggtgtggcacaaccaaaaaccaaggcttcatgaaatggtactagattattcgctagaaacaaaagaatttcaatggaatcgaaatcatcatgagctcatcaaatgcg

SEQ ID NO: 39881 - DNA, 1725 bp, Muscodor strobelii
  misc_feature: SGI cDNA ID NO. 573890
  misc_feature: Encodes the peptide sequence at SEQ ID NO 39882
atggcgttgccgtctcgcagagcagagccccagatggaccctatcagcgattccgagtctgatgattctcaaggcgaggaaggctggaaagacgtggatgaggacgatgaagaggatacccaagatatcatctcactgcttgatgatcgtgtgtttcatgacgctatgtccatgttgacgcactgcaaggaagcccatggctttgatttcttaggattacgacaacgactacagctagattttcatgggtgtgtgaagctggttaactatattcgtcaacgcgtacatgagggcctccaggtcagtcaggacatcacgcaatcagattttgatgacgacgcctatctcaagcctgtgttggatgacgacgccttcatcatgagtctcttcgatctgcccgaggtgacagagggcgctagcattgctggcgacagcgaaaacaacgcctctctcgttcaatcgttactcaagcgcaaccgggagctcgaggatgagattgcccgaatgtctacgcaattcgataccttccgcgccactgtttctgagacccttgacgagcgctggggcgtgaagggtgacatgaaggatgacccgatgactggaccctcgagcgctgcgaaggataagcaaagcgagagtgatgacaagaaagaggatgagtcgcagtattactgggattcgtattcttctgttgatatccatgagactatgctcaaggacaaagtccgtaccaatgcataccgagacttcatctaccagaacaagcagctattcgccggaaagaccgtactcgatatcggctgcggctcaggtatcctaagcatgttctgtgcccgcgccggcgccgcgcgcgtcatcgcagtcgacgcttcaaacataatcactcgtgcccgcgagaacatcttccgcgcgggtcttcaggacgtcatcaccactctccacggcaagatggaggaggtcacgttaccagtcgacaaggtcgacatcatcgtgtctgagtggatgggctactgtctgctctacgaggcaatgcttccctccgtcatctacgcccgcgacaagtatctcgcacccggtggccttatggtcccctctcacaccaacatgtggattgcaccggtctctgattcgaactacgtcagtgaacatggtccgacgtactgggcggatgtatatggattcgacatgtctgcgatggctaagggcatttatgacgaggtcagagtcgaccactggccgaaggacactgtctgcggttcgggtgccgcattctgcatgctggatctttatactgtcaaggcagaggatctaagtttcaccgctgcgtggacatgcaagttttccgaggatgtcgataccgtcgacgggttcctcatctggttcgataccttcttctctccccaagctcttaacgccaattataaattcctcgcccactccgtacccgacgatgccgttgccgattcatggatcatctccgccaagggcgagagaatccaagaccgaatcgcgttcacgacgggtccgtacaacaccgagacccactggaagcagggttttctcctctgcgaggccgattcggcactcaagcaaaagaagaaggacacagaaattaggggcactatcactttctctgttgctgagagtaatgctcgtgcgctgaatatcaaggtgacgttttccgaggagcgaggagaggtcactcaggtctgggcccttaagtaa

SEQ ID NO: 39882 - protein, 574 aa, Muscodor strobelii
  misc_feature: SGI Peptide ID NO. 573890
  misc_feature (264)..(364): Pfam Id: PF08241 Pfam Desc: Methyltransferase domain
  misc_feature (264)..(362): Pfam Id: PF08242 Pfam Desc: Methyltransferase domain
  misc_feature (264)..(335): Pfam Id: PF08241 Pfam Desc: Methyltransferase domain
  misc_feature (259)..(289): Pfam Id: PF06325 Pfam Desc: Ribosomal protein L11 methyltransferase (PrmA)
  misc_feature (15)..(574): NCBI GI: 261352945 Blast Desc: HNRNP arginine N-methyltransferase [Verticillium albo-atrum VaMs.102]
  misc_feature (26)..(573): NCBI GI: 164428112 Blast Desc: NCU01669 [Neurospora crassa OR74A] gi|157072017|gb|EAA27639.2| conserved [Neurospora crassa OR74A]
  misc_feature (22)..(574): NCBI GI: 156034432 Blast Desc: SS1G_13519 [Sclerotinia sclerotiorum 1980] gi|154698922|gb|EDN98660.1| SS1G_13519 [Sclerotinia sclerotiorum 1980]
  misc_feature (22)..(574): NCBI GI: 154295492 Blast Desc: BC1G_13371 [Botryotinia fuckeliana B05.10] gi|150843997|gb|EDN19190.1| BC1G_13371 [Botryotinia fuckeliana B05.10]
  misc_feature (8)..(571): NCBI GI: 171689008 Blast Desc: protein product [Podospora anserina] gi|170944466|emb|CAP70577.1| protein product [Podospora anserina]
  misc_feature (58)..(573): NCBI GI: 7800799 Blast Desc: related to protein arginine N-methyltransferase 3 [Neurospora crassa]
  misc_feature (15)..(574): NCBI GI: 256729193 Blast Desc: protein arginine N-methyltransferase [Nectria haematococca mpVI 77-13-4]
  misc_feature (15)..(574): NCBI GI: 46138407 Blast Desc: FG10718.1 [Gibberella zeae PH-1]
  misc_feature (43)..(466): NCBI GI: 116204853 Blast Desc: CHGG_10310 [Chaetomium globosum CBS 148.51] gi|88176438|gb|EAQ83906.1| CHGG_10310 [Chaetomium globosum CBS 148.51]
  misc_feature (29)..(571): NCBI GI: 145610541 Blast Desc: MGG_11428 [Magnaporthe grisea 70-15] gi|145017906|gb|EDK02185.1| MGG_11428 [Magnaporthe grisea 70-15]
  misc_feature (224)..(560): SWISSPROT Homolog: EC 2.1.1.125 Histone-arginine N-methyltransferase
MALPSRRAEPQMDPISDSESDDSQGEEGWKDVDEDDEEDTQDIISLLDDRVFHDAMSMLTHCKEAHGFDFLGLRQRLQLDFHGCVKLVNYIRQRVHEGLQVSQDITQSDFDDDAYLKPVLDDDAFIMSLFDLPEVTEGASIAGDSENNASLVQSLLKRNRELEDEIARMSTQFDTFRATVSETLDERWGVKGDMKDDPMTGPSSAAKDKQSESDDKKEDESQYYWDSYSSVDIHETMLKDKVRTNAYRDFIYQNKQLFAGKTVLDIGCGSGILSMFCARAGAARVIAVDASNIITRARENIFRAGLQDVITTLHGKMEEVTLPVDKVDIIVSEWMGYCLLYEAMLPSVIYARDKYLAPGGLMVPSHTNMWIAPVSDSNYVSEHGPTYWADVYGFDMSAMAKGIYDEVRVDHWPKDTVCGSGAAFCMLDLYTVKAEDLSFTAAWTCKFSEDVDTVDGFLIWFDTFFSPQALNANYKFLAHSVPDDAVADSWIISAKGERIQDRIAFTTGPYNTETHWKQGFLLCEADSALKQKKKDTEIRGTITFSVAESNARALNIKVTFSEERGEVTQVWALK

SEQ ID NO: 39883 - DNA, 5883 bp, Muscodor strobelii
  misc_feature: SGI EST ID NO. CUFF.96418.0
  misc_feature: Variant of the nucleotide sequence at SEQ ID NO 39881
tgcatcaaaacgcagcgtcccgaaagctcaagtacggattacatgtagatgcagctatgccagctcacccgaactggtttgcctcaggtgaactggccagatgagcaaaccacccttggatagcagatagcaccaacattattcacgatcgtgacgcttgtagcttcttcgccccttgtatcttacttgggacgttcgtcttacctagagcggatatcgctttcccttacgatctgacattgtgccatctgaacttcgtatctgcctccctcatcttgtcgattgaccgcgccatgtccgtcgctgtgtaatccactgctccctttgccaatggaatggcactgtttcgcaagagcgtgaagcacccatacgaaccatgttctcgagcatcgccgctgctcccgccaagcagtctgtcggcgagaccatcaatgtcctcagcggacgtctgggttccgccactctccttgaagaccgtcgagccgctatccttggtctgcggagcttcgccaaagactaccctgcctctgtcgcttccggcgcgctcaggagcctgatcggcagtttaactaccgatggcgaagatgtcgacaccataaagtcggtcctcgagaccttgctgatgctatttagccccaaccaagacagcccggaagcgtctgaagagattgccttatggcttgctgacgagttcacccagcgccaggagaatatcactttgctcctcaacttcctcgagtccagcgatttccactctcgcctgtattctctacagcttctagtcgccattctctcatcgcgtaccgagagaacagaggaatgcatcgccttggcgccccttggcatccctcgactggttgctgtcctcgaagatcggcgcgaggccattcgaaacgaggccctcacacttttgacctaccttacgccgtcctctccactcatacaacagtccgtggcataccagaatgcatttgaacgagtctttgctatcatcgaggcagaaggatcattgctagacggcgatagaatcatcgaggactgtcttatctttctcgccaaccttttacggctgaacccttctaaccagtcactgtttcgggaaagcgggtgcgttctccagcttgccaagctgctggagagcacatatcacaagcggcaagaggaggaagaagtggcaggctgggtccaggagcagcgaaacaggaatacgtatgctttgctagcggttacacggctgttcttggtgtcgggtgccgtagggacgtcgcagaaccaggccagtttctggcagcatggagttctgtaccacgcgctacagcttgcgtttagccacgatgctgaaatgcctatcagagcagaggcgttggccacttgtgccgctaccattaaagggaatgcgaaactccaggagacgttcgctgagctccaggtaccgtcggtgctggaaacgggtgcggccaccaatggacaaaatggtagacagaaaggcccaccgcttgtctatgtgatagacggcctactagacctatccctcagtatcccctcaacccaggcattcgatcttcgtgtagctgcatgcgaatgcatcaaagcctatttttttggccatccccaggtccggatgcatttcttgcgacgtgccatacaaggccactcctctggcgttgacgaaacggcgaacgtgttgactacgctcttgcgccctgttgaaatgtccgctgtcgatccttatcgtcactggttcgctgccgctatcatgttccacctcatatttgagaatcctgagggtaaagcaatcgccatggcggtgaccgaaggagacgctgagaatggtgaagaagtcgtcaccagcattcagaccataacggcccatctggtttccgcacttggccgaggggacgatgatcgcgtatcggtgggttatctgatgttgctaaccgcatggctatttgaagatcttgacggggtgaatgatttcttgggtgaagggagcaatatccaagcacttgctcaggaaattgtgcggcatcctcccagtagtgttctcattcaagggctttgtgcaatgattctcggcgttgtctacgagttctctaccaaggattctccaattcctcgggctactatccactctgtaattctttcacgagtcggacgagacaagtatatggatgctttcaacaaactccgaagtcatcctcttctacgagatttcgaggtaactccgcaaaaggctgacggatctggcaacttaccggatgttttctttgatgcgacatttgtcgaattctttaaggataactatagtcgaatggcgcgagctgtcgatcgggaccccggtatggagatatctgtagtgacgaatggtgtccagaagggtatatctcgcgagcttgtcgattcactgcggagccaggttgaagaaaaggaggtggctctccaagctgctcttgcagacgttgcatcactcaacggaaagctaggtcaagaacaggctgatcatcgtcgctcaaaagaagcatccgtgacggacctcgcacggatcaagagtgttaatgaagcaatacaacgcaatcacgaagaggagctaaagaaactggataaaaaacagcaggcaaagattgatgcacacgagcggcagcttcaagctgctcaaaaagaagctgctgtagccgcagaaaccatccgcgtagaagctgctgcgaaagaggccgagttacaaaggcagttggaatatgttcgaaagactgctgaagcagatgctgctcgggttctacgtaggtcggaagctgaaatggctgatctgcgcgcgactatcagccgtctcgaggtcgatattatgaaggcaaacaaagccaaaactcaagagcttcaagctgttcgcgaagatctcggcgccaagctaaaggctgaagagacgaagtcaaaagctgctgagaaggacttcaacgcgacagaggcgaaactcaaagcagcagagaaacgaacaacggatctagaaactcggctgtcggaaaaggtaaccgaggtcgaaggggtgcgtgtcatctctatgcattgtgtggattgctattgatatttcacaggttcaaactcaactaaaagagaaagaagagcaatgctcaacaacacaaactgaattagacgacctcctcatggtcttcggtgatctagaggagaaagtggagaagtacaagaaacgcttgcaagagctaggggaaaccgtgtccgaggcagaagaagaggaggaggaggatgatgacgaagatgacgatgaagaggacgttgattaaaccctaactataagacacatctacccaaatctttaattgttgcatcgaacggtcatgtccgaggccttcgatcaatcaatcagacgtcgtgagagtccaaggtcaacatttgaacctcgaggactcatggcttcactcttatggagatgcacgtatcgtgattgggcgcggagtagctatgcatttatccgatatatctgaacatgctggaacctccacaatcccacttcttaagaaattatcttgagatacaagatattgcgaataatcgcaagctcttgtcaagtgtttttgagtaatcctaaaatacggcgatgtataacaggtacctgcgctgatcgaatgtgaagcaaaaatacactagagcagagtcgaagtccctaacgcattaacacttcaaccccagagcatcaggacctcttactattctctatcgccctcgtacaccaaggacaatcagcagatatctctcaatcattacttatacacaaatactccaacataactctaatatctgtctgcgctaccctcaaaatcaatctaagatggcgttgccgtctcgcagagcagagccccagatggaccctatcagcgattccgagtctgatgattctcaaggcgaggaaggctggaaagacgtggatgaggacgatgaagaggatacccaagatatcatctcactgcttgatgatcgtgtgtttcatgacgctatgtccatgttgacgcactgcaaggaagcccatggctttgatttcttaggattacgacaacgactacagctagattttcatgggtgtgtgaagctggttaactatattcgtcaacgcgtacatgagggcctccaggtcagtcaggacatcacgcaatcagattttgatgacgacgcctatctcaagcctgtgttggatgacgacgccttcatcatgagtctcttcgatctgcccgaggtgacagagggcgctagcattgctggcgacagcgaaaacaacgcctctctcgttcaatcgttactcaagcgcaaccgggagctcgaggatgagattgcccgaatgtctacgcaattcgataccttccgcgccactgtttctgagacccttgacgagcgctggggcgtgaagggtgacatgaaggatgacccgatgactggaccctcgagcgctgcgaaggataagcaaagcgagagtgatgacaagaaagaggatgagtcgcagtattactgggattcgtattcttctgttgatatccatgagactatgctcaaggacaaagtccgtaccaatgcataccgagacttcatctaccagaacaagcagctattcgccggaaagaccgtactcgatatcggctgcggctcaggtatcctaagcatgttctgtgcccgcgccggcgccgcgcgcgtcatcgcagtcgacgcttcaaacataatcactcgtgcccgcgagaacatcttccgcgcgggtcttcaggacgtcatcaccactctccacggcaagatggaggaggtcacgttaccagtcgacaaggtcgacatcatcgtgtctgagtggatgggctactgtctgctctacgaggcaatgcttccctccgtcatctacgcccgcgacaagtatctcgcacccggtggccttatggtcccctctcacaccaacatgtggattgcaccggtctctgattcgaactacgtcagtgaacatggtccgacgtactgggcggatgtatatggattcgacatgtctgcgatggctaagggcatttatgacgaggtcagagtcgaccactggccgaaggacactgtctgcggttcgggtgccgcattctgcatgctggatctttatactgtcaaggcagaggatctaagtttcaccgctgcgtggacatgcaagttttccgaggatgtcgataccgtcgacgggttcctcatctggttcgataccttcttctctccccaagctcttaacgccaattataaattcctcgcccactccgtacccgacgatgccgttgccgattcatggatcatctccgccaagggcgagagaatccaagaccgaatcgcgttcacgacgggtccgtacaacaccgagacccactggaagcagggttttctcctctgcgaggccgattcggcactcaagcaaaagaagaaggacacagaaattaggggcactatcactttctctgttgctgagagtaatgctcgtgcgctgaatatcaaggtgacgttttccgaggagcgaggagaggtcactcaggtctgggcccttaagtaagttctttcgatgagaatggagagcccggctatggtgaaaatggagtttagcagttgattgtggaagagtggagatatcagtgtggcttcaaggcggatttttaagaagggaaatcctgctcgtatcagaatagtagctcctgatagcattattcgatgcggaaaagatatcagactacggtttcagaccaatgttacattgtttagcaattaagcaggactgaatattgagtgttgttaaatgcattcaataccatgagcctttctgattcacttgttttggactcatggtcggcaaaggatcactatttaaaaatcaag

SEQ ID NO: 39884 - DNA, 2868 bp, Muscodor strobelii
  misc_feature: SGI cDNA ID NO. 573891
  misc_feature: Encodes the peptide sequence at SEQ ID NO 39885
atgttctcgagcatcgccgctgctcccgccaagcagtctgtcggcgagaccatcaatgtcctcagcggacgtctgggttccgccactctccttgaagaccgtcgagccgctatccttggtctgcggagcttcgccaaagactaccctgcctctgtcgcttccggcgcgctcaggagcctgatcggcagtttaactaccgatggcgaagatgtcgacaccataaagtcggtcctcgagaccttgctgatgctatttagccccaaccaagacagcccggaagcgtctgaagagattgccttatggcttgctgacgagttcacccagcgccaggagaatatcactttgctcctcaacttcctcgagtccagcgatttccactctcgcctgtattctctacagcttctagtcgccattctctcatcgcgtaccgagagaacagaggaatgcatcgccttggcgccccttggcatccctcgactggttgctgtcctcgaagatcggcgcgaggccattcgaaacgaggccctcacacttttgacctaccttacgccgtcctctccactcatacaacagtccgtggcataccagaatgcatttgaacgagtctttgctatcatcgaggcagaaggatcattgctagacggcgatagaatcatcgaggactgtcttatctttctcgccaaccttttacggctgaacccttctaaccagtcactgtttcgggaaagcgggtgcgttctccagcttgccaagctgctggagagcacatatcacaagcggcaagaggaggaagaagtggcaggctgggtccaggagcagcgaaacaggaatacgtatgctttgctagcggttacacggctgttcttggtgtcgggtgccgtagggacgtcgcagaaccaggccagtttctggcagcatggagttctgtaccacgcgctacagcttgcgtttagccacgatgctgaaatgcctatcagagcagaggcgttggccacttgtgccgctaccattaaagggaatgcgaaactccaggagacgttcgctgagctccaggtaccgtcggtgctggaaacgggtgcggccaccaatggacaaaatggtagacagaaaggcccaccgcttgtctatgtgatagacggcctactagacctatccctcagtatcccctcaacccaggcattcgatcttcgtgtagctgcatgcgaatgcatcaaagcctatttttttggccatccccaggtccggatgcatttcttgcgacgtgccatacaaggccactcctctggcgttgacgaaacggcgaacgtgttgactacgctcttgcgccctgttgaaatgtccgctgtcgatccttatcgtcactggttcgctgccgctatcatgttccacctcatatttgagaatcctgagggtaaagcaatcgccatggcggtgaccgaaggagacgctgagaatggtgaagaagtcgtcaccagcattcagaccataacggcccatctggtttccgcacttggccgaggggacgatgatcgcgtatcggtgggttatctgatgttgctaaccgcatggctatttgaagatcttgacggggtgaatgatttcttgggtgaagggagcaatatccaagcacttgctcaggaaattgtgcggcatcctcccagtagtgttctcattcaagggctttgtgcaatgattctcggcgttgtctacgagttctctaccaaggattctccaattcctcgggctactatccactctgtaattctttcacgagtcggacgagacaagtatatggatgctttcaacaaactccgaagtcatcctcttctacgagatttcgaggtaactccgcaaaaggctgacggatctggcaacttaccggatgttttctttgatgcgacatttgtcgaattctttaaggataactatagtcgaatggcgcgagctgtcgatcgggaccccggtatggagatatctgtagtgacgaatggtgtccagaagggtatatctcgcgagcttgtcgattcactgcggagccaggttgaagaaaaggaggtggctctccaagctgctcttgcagacgttgcatcactcaacggaaagctaggtcaagaacaggctgatcatcgtcgctcaaaagaagcatccgtgacggacctcgcacggatcaagagtgttaatgaagcaatacaacgcaatcacgaagaggagctaaagaaactggataaaaaacagcaggcaaagattgatgcacacgagcggcagcttcaagctgctcaaaaagaagctgctgtagccgcagaaaccatccgcgtagaagctgctgcgaaagaggccgagttacaaaggcagttggaatatgttcgaaagactgctgaagcagatgctgctcgggttctacgtaggtcggaagctgaaatggctgatctgcgcgcgactatcagccgtctcgaggtcgatattatgaaggcaaacaaagccaaaactcaagagcttcaagctgttcgcgaagatctcggcgccaagctaaaggctgaagagacgaagtcaaaagctgctgagaaggacttcaacgcgacagaggcgaaactcaaagcagcagagaaacgaacaacggatctagaaactcggctgtcggaaaaggtaaccgaggtcgaaggggttcaaactcaactaaaagagaaagaagagcaatgctcaacaacacaaactgaattagacgacctcctcatggtcttcggtgatctagaggagaaagtggagaagtacaagaaacgcttgcaagagctaggggaaaccgtgtccgaggcagaagaagaggaggaggaggatgatgacgaagatgacgatgaagaggacgttgattaa

SEQ ID NO: 39885 - protein, 955 aa, Muscodor strobelii
  misc_feature: SGI Peptide ID NO. 573891
  misc_feature (823)..(951): Pfam Id: PF04871 Pfam Desc: Uso1 / p115 like vesicle tethering protein, C terminal region
  misc_feature (339)..(650): Pfam Id: PF04869 Pfam Desc: Uso1 / p115 like vesicle tethering protein, head region
  misc_feature (903)..(951): Pfam Id: PF04871 Pfam Desc: Uso1 / p115 like vesicle tethering protein, C terminal region
  misc_feature (1)..(935): NCBI GI: 145610539 Blast Desc: MGG_11427 [Magnaporthe grisea 70-15] gi|145017905|gb|EDK02184.1| MGG_11427 [Magnaporthe grisea 70-15]
  misc_feature (1)..(953): NCBI GI: 46138405 Blast Desc: FG10717.1 [Gibberella zeae PH-1]
  misc_feature (14)..(935): NCBI GI: 156034480 Blast Desc: SS1G_13543 [Sclerotinia sclerotiorum 1980] gi|154698946|gb|EDN98684.1| SS1G_13543 [Sclerotinia sclerotiorum 1980]
  misc_feature (14)..(934): NCBI GI: 154295530 Blast Desc: BC1G_13390 [Botryotinia fuckeliana B05.10] gi|150844016|gb|EDN19209.1| BC1G_13390 [Botryotinia fuckeliana B05.10]
  misc_feature (1)..(940): NCBI GI: 85078986 Blast Desc: NCU01644 [Neurospora crassa OR74A] gi|9368941|emb|CAB99171.1| related to transport protein USO1 [Neurospora crassa] gi|28917322|gb|EAA27030.1| [Neurospora crassa
  misc_feature (1)..(935): NCBI GI: 116204851 Blast Desc: CHGG_10309 [Chaetomium globosum CBS 148.51] gi|88176437|gb|EAQ83905.1| CHGG_10309 [Chaetomium globosum CBS 148.51]
  misc_feature (9)..(936): NCBI GI: 154276490 Blast Desc: HCAG_06695 [Ajellomyces capsulatus NAm1] gi|150414163|gb|EDN09528.1| HCAG_06695 [Ajellomyces capsulatus NAm1]
  misc_feature (9)..(936): NCBI GI: 225560324 Blast Desc: conserved [Ajellomyces capsulatus G186AR]
  misc_feature (8)..(935): NCBI GI: 226289076 Blast Desc: intracellular protein transport protein (UsoA) [Paracoccidioides brasiliensis Pb18]
  misc_feature (8)..(931): NCBI GI: 212531979 Blast Desc: intracellular protein transport protein (UsoA), [Penicillium marneffei ATCC 18224] gi|210071510|gb|EEA25599.1| intracellular protein transport protein (UsoA), [Penicillium ATCC
MFSSIAAAPAKQSVGETINVLSGRLGSATLLEDRRAAILGLRSFAKDYPASVASGALRSLIGSLTTDGEDVDTIKSVLETLLMLFSPNQDSPEASEEIALWLADEFTQRQENITLLLNFLESSDFHSRLYSLQLLVAILSSRTERTEECIALAPLGIPRLVAVLEDRREAIRNEALTLLTYLTPSSPLIQQSVAYQNAFERVFAIIEAEGSLLDGDRIIEDCLIFLANLLRLNPSNQSLFRESGCVLQLAKLLESTYHKRQEEEEVAGWVQEQRNRNTYALLAVTRLFLVSGAVGTSQNQASFWQHGVLYHALQLAFSHDAEMPIRAEALATCAATIKGNAKLQETFAELQVPSVLETGAATNGQNGRQKGPPLVYVIDGLLDLSLSIPSTQAFDLRVAACECIKAYFFGHPQVRMHFLRRAIQGHSSGVDETANVLTTLLRPVEMSAVDPYRHWFAAAIMFHLIFENPEGKAIAMAVTEGDAENGEEVVTSIQTITAHLVSALGRGDDDRVSVGYLMLLTAWLFEDLDGVNDFLGEGSNIQALAQEIVRHPPSSVLIQGLCAMILGVVYEFSTKDSPIPRATIHSVILSRVGRDKYMDAFNKLRSHPLLRDFEVTPQKADGSGNLPDVFFDATFVEFFKDNYSRMARAVDRDPGMEISVVTNGVQKGISRELVDSLRSQVEEKEVALQAALADVASLNGKLGQEQADHRRSKEASVTDLARIKSVNEAIQRNHEEELKKLDKKQQAKIDAHERQLQAAQKEAAVAAETIRVEAAAKEAELQRQLEYVRKTAEADAARVLRRSEAEMADLRATISRLEVDIMKANKAKTQELQAVREDLGAKLKAEETKSKAAEKDFNATEAKLKAAEKRTTDLETRLSEKVTEVEGVQTQLKEKEEQCSTTQTELDDLLMVFGDLEEKVEKYKKRLQELGETVSEAEEEEEEDDDEDDDEEDVD

SEQ ID NO: 39886 - DNA, 5883 bp, Muscodor strobelii; identical to SEQ ID NO: 39883
  misc_feature: SGI EST ID NO. CUFF.96418.0
  misc_feature: Variant of the nucleotide sequence at SEQ ID NO 39884

SEQ ID NO: 39887 - DNA, 2967 bp, Muscodor strobelii
  misc_feature: SGI cDNA ID NO. 573892
  misc_feature: Encodes the peptide sequence at SEQ ID NO 39888
atgggtattcccgcggcctttcggtggctttccaccaaataccccaagatcatctctcccgtcatcgaggataagcccattgtcatggacgatggctctgtcatacccgtcgacaccacccgacccaatcccaacggcgaagagttcgacaatctgtacctcgatatgaacggaattgtacatccatgttcgcatcccgaagaccgacctgcacccaaagacgaggaggagatgatgttggaaatattcaagtacactgaccgcgtagtaaacatggttcgccccaggaagttgctgatgatcgctattgacggagttgctccgcgtgccaagatgaaccagcagcgatcgcgacgtttccgtgctgcgcaagaggccaaggataaggcggccgataaggaagagctattgaagatgatcaagcaacaaaatggtggtgtgttgccacctgagacgcttgagtcgttgaccaagaaagcgttcgattccaattctatcacccccggtactcccttcatggatattctagctatcagtttgagatattggtgttcctacaagctaaacactgacccgggctgggccaatatgaaagtcatcatatccgatgccactgtccctggagaaggcgagcacaagatcatgaactttgtccgttctcagcgtgcctcgcctgatcatgatcctaatacgagacacgtcatctatggactggatgccgatcttatcatgctcggtctggctacccatgaacctcacttccgtgtacttcgagaagatgtgtttttccaagagggcaaggcccgcacgtgcaaaatttgtggtcaaaaaggccacgacgctcagaattgccgaggcgaaactaagcagaaggatggtgagtttgatgaaaaagacaaagcactcccactcaagcctttcatctggctgcatgtctccgttctccgagaatatcttgctgtagagcttgaggtgcctggcttgcctttccgttttgaccttgagagagcacttgatgattgggtcttcatgtgctttttcgttggcaacgatttccttccgcatctccctgcacttgaaatccgtgaaaacggcattgatacattgactgccatttggagagacaacctgccttttatgggaggctatatgactaaggatggtcacgtcgatcttgagagagcgcagtatatactcgacggtctaggcaaacaggaagatgccattttcagacgtcgaaaagaaactgaagaccgtcgagaagcgagcttcaaacgacgaaagctgcaagagcaacagcgtaatggacggaataataccccgggatccaaggatagcagaaacgcatccaacgatgggcttccaagcggcttgccccagggtcttacgcatgatatgattgtgaaccgcgcagcgacaaccgatgacgccaatacggctaacaagagtgccgctgctgttttaaaggctcagattaagggcctcatggctacacctacgaagaatgaggagaaatcccaatcttccgaagcgcaaacaccaccgtctgctctaggcaaacggaaggcagctctgctggaagatgccgcaagcacaccaggtagtacatcaagtgtcggtgaagaacccgaagatcccgttcgaatgtgggaagagggatatgcggataggtattacgaagccaaattccatgttgatcccaaagatctcgacttccgtcgtcaggtcgcctgggcttataccgaaggactagcatgggtgctcaggtattacttccagggctgcccttcctgggagtggttctatccgtatcattatgcccccttcgcccaagacttcaaggatctcgcgaaaatggagatcaagtttgagaagggcaggattgcaaggccttttgagcaactcatgagtgtgcaacctgctgcctcacgacatgtccttcctgacgttttccatgatctcatgcagaacgaagacagtccgatcatcgatttctacccagaagacttcgtcgtcgaccttaatggtaagaagatggcgtggcaaggcgtagctcttctgccgttcattgaaatgccgcgacttctggctgcaatcgaggaaaagtatcctttgctgagcccagaagatgcggcacgcaatgcgcctggtaaagagtgtctcatactttccgaggcaaatcaagagctgtacgacgacatcataggacaattctattctaaaaagcagggtgcacctaaatacgacctggacgctcgtaagagtcgggggttatcgggaaaaatcgagaagatggaggactatcttccacacggaaccctcgaatacccgctggaacgtaaggggttacctgatgtcgatgatgaccgatcaataaccgtatactatgatatgccaaagtctagtcacacccacaagtcgatgctattacgtggggttcaaatgcctgtgccagctctgaatggtagcgacattgaggagctcaaaggtaaggctcgaaactcgggccgtagctatcgtggtgcttccctcggacagcaccgcggcgacggaagaacggatcgcatgaattatggtccgaactctcaacaatatcagccgcgccataataatggcaacaactacaacaatcgcaattcttaccctgggccgccaccgcctatggtccctccgggatgggctcctcctcctccaccgggcttccccggatttggcagtggcccgccgccgccacccccgaattatcaaggcaaccatcgaggcaattataacaacggctacaacagcggtcgtggtggtccatcaggcgggaaccagggctatgggcagagatatgccccgccagctccgcctggatacaacagttcctacggcgggcagcataatggccatcagggacgagatcgccaatcatatgatggtggtcgcaactaccgtggcggtcgtggtcagggtcataggtactag

SEQ ID NO: 39888 - protein, 988 aa, Muscodor strobelii
  misc_feature: SGI Peptide ID NO. 573892
  misc_feature (1)..(261): Pfam Id: PF03159 Pfam Desc: XRN 5'-3' exonuclease N-terminus
  misc_feature (1)..(859): NCBI GI: 116204849 Blast Desc: CHGG_10308 [Chaetomium globosum CBS 148.51] gi|115311955|sp|Q2GNZ6.3|XRN2_CHAGB RecName: Full=5'-3' exoribonuclease 2 gi|88176436|gb|EAQ83904.1| CHGG_10308 globosum
  misc_feature (1)..(828): NCBI GI: 46138403 Blast Desc: FG10716.1 [Gibberella zeae PH-1] gi|115311956|sp|Q4HWE2.3|XRN2_GIBZE RecName: Full=5'-3' exoribonuclease 2
  misc_feature (1)..(854): NCBI GI: 85078982 Blast Desc: NCU01643 [Neurospora crassa OR74A] gi|74630414|sp|Q8WZX5.3|XRN2_NEUCR RecName: Full=5'-3' exoribonuclease 2 gi|18307456|emb|CAD21516.1| related to dna
  misc_feature (1)..(842): NCBI GI: 171690192 Blast Desc: protein product [Podospora anserina] gi|170945044|emb|CAP71155.1| protein product [Podospora anserina]
  misc_feature (1)..(907): NCBI GI: 145610537 Blast Desc: MGG_11426 [Magnaporthe grisea 70-15] gi|145017904|gb|EDK02183.1| MGG_11426 [Magnaporthe grisea 70-15]
  misc_feature (1)..(967): NCBI GI: 119495190 Blast Desc: exoribonculease Dhp1 [Neosartorya fischeri NRRL 181] gi|119412547|gb|EAW22488.1| exoribonculease Dhp1 [Neosartorya fischeri NRRL 181]
  misc_feature (1)..(967): NCBI GI: 70995976 Blast Desc: 5'->3' exoribonculease Dhp1 [Aspergillus fumigatus Af293] gi|74630336|sp|Q8TFZ1.4|XRN2_ASPFU RecName: Full=5'-3' exoribonuclease 2 gi|44889966|emb|CAD29606.2| [Aspergillus 5'->3'
  misc_feature (1)..(896): NCBI GI: 115492077 Blast Desc: 5'-3' exoribonuclease 2 [Aspergillus terreus NIH2624] gi|114197526|gb|EAU39226.1| 5'-3' exoribonuclease 2 [Aspergillus terreus NIH2624]
  misc_feature (1)..(969): NCBI GI: 145240295 Blast Desc: An08g06790 [Aspergillus niger] gi|134077309|emb|CAK45649.1| protein product [Aspergillus niger]
  misc_feature (1)..(981): NCBI GI: 169763218 Blast Desc: [Aspergillus oryzae RIB40] gi|238489103|ref|XP_002375789.1| 5'->3' exoribonculease Dhp1 [Aspergillus flavus NRRL3357] gi|115311954|sp|Q2UCP5.3|XRN2_ASPOR
MGIPAAFRWLSTKYPKIISPVIEDKPIVMDDGSVIPVDTTRPNPNGEEFDNLYLDMNGIVHPCSHPEDRPAPKDEEEMMLEIFKYTDRVVNMVRPRKLLMIAIDGVAPRAKMNQQRSRRFRAAQEAKDKAADKEELLKMIKQQNGGVLPPETLESLTKKAFDSNSITPGTPFMDILAISLRYWCSYKLNTDPGWANMKVIISDATVPGEGEHKIMNFVRSQRASPDHDPNTRHVIYGLDADLIMLGLATHEPHFRVLREDVFFQEGKARTCKICGQKGHDAQNCRGETKQKDGEFDEKDKALPLKPFIWLHVSVLREYLAVELEVPGLPFRFDLERALDDWVFMCFFVGNDFLPHLPALEIRENGIDTLTAIWRDNLPFMGGYMTKDGHVDLERAQYILDGLGKQEDAIFRRRKETEDRREASFKRRKLQEQQRNGRNNTPGSKDSRNASNDGLPSGLPQGLTHDMIVNRAATTDDANTANKSAAAVLKAQIKGLMATPTKNEEKSQSSEAQTPPSALGKRKAALLEDAASTPGSTSSVGEEPEDPVRMWEEGYADRYYEAKFHVDPKDLDFRRQVAWAYTEGLAWVLRYYFQGCPSWEWFYPYHYAPFAQDFKDLAKMEIKFEKGRIARPFEQLMSVQPAASRHVLPDVFHDLMQNEDSPIIDFYPEDFVVDLNGKKMAWQGVALLPFIEMPRLLAAIEEKYPLLSPEDAARNAPGKECLILSEANQELYDDIIGQFYSKKQGAPKYDLDARKSRGLSGKIEKMEDYLPHGTLEYPLERKGLPDVDDDRSITVYYDMPKSSHTHKSMLLRGVQMPVPALNGSDIEELKGKARNSGRSYRGASLGQHRGDGRTDRMNYGPNSQQYQPRHNNGNNYNNRNSYPGPPPPMVPPGWAPPPPPGFPGFGSGPPPPPPNYQGNHRGNYNNGYNSGRGGPSGGNQGYGQRYAPPAPPGYNSSYGGQHNGHQGRDRQSYDGGRNYRGGRGQGHRY

SEQ ID NO: 39889 - DNA, 3631 bp, Muscodor strobelii
  misc_feature: SGI EST ID NO. CUFF.96321.0
  misc_feature: Variant of the nucleotide sequence at SEQ ID NO 39887
ccgactttggcatgcgacaacctcgctgctttgttccaacaacgcaactttcctttcaactattcgcgtgagaggtaaggcaatctgtcgcatctccagtgacttcgctacggcggttcgcgcgttccatctctaagcatctgcccgccgcgcctgccattcgcgaaacgtccaagttcgcgctcgttgcctgctttgttcgactccatccgatatcgaagccagcccttccgcgccattcttttgcccttcgcgatcagtccgcggtcaattactcattcgtctgtattaacgtgcatggataattgtacttgaacgtgtatcctgagcgagtcttttgcttttacatctggcaccacctatatagagcagtagacgagtttttgtttccgtatgcatcgctagtccagcatcactattatcatcgcgactaccttgcgaccactaccgccgccatgggtattcccgcggcctttcggtggctttccaccaaataccccaagatcatctctcccgtcatcgaggataagcccattgtcatggacgatggctctgtcatacccgtcgacaccacccgacccaatcccaacggcgaagagttcgacaatctgtacctcgatatgaacggaattgtacatccatgttcgcatcccgaagaccgacctgcacccaaagacgaggaggagatgatgttggaaatattcaagtacactgaccgcgtagtaaacatggttcgccccaggaagttgctgatgatcgctattgacggagttgctccgcgtgccaagatgaaccagcagcgatcgcgacgtttccgtgctgcgcaagaggccaaggataaggcggccgataaggaagagctattgaagatgatcaagcaacaaaatggtggtgtgttgccacctgagacgcttgagtcgttgaccaagaaagcgttcgattccaattctatcacccccggtactcccttcatggatattctagctatcagtttgagatattggtgttcctacaagctaaacactgacccgggctgggccaatatgaaagtcatcatatccgatgccactgtccctggagaaggcgagcacaagatcatgaactttgtccgttctcagcgtgcctcgcctgatcatgatcctaatacgagacacgtcatctatggactggatgccgatcttatcatgctcggtctggctacccatgaacctcacttccgtgtacttcgagaagatgtgtttttccaagagggcaaggcccgcacgtgcaaaatttgtggtcaaaaaggccacgacgctcagaattgccgaggcgaaactaagcagaaggatggtgagtttgatgaaaaagacaaagcactcccactcaagcctttcatctggctgcatgtctccgttctccgagaatatcttgctgtagagcttgaggtgcctggcttgcctttccgttttgaccttgagagagcacttgatgattgggtcttcatgtgctttttcgttggcaacgatttccttccgcatctccctgcacttgaaatccgtgaaaacggcattgatacattgactgccatttggagagacaacctgccttttatgggaggctatatgactaaggatggtcacgtcgatcttgagagagcgcagtatatactcgacggtctaggcaaacaggaagatgccattttcagacgtcgaaaagaaactgaagaccgtcgagaagcgagcttcaaacgacgaaagctgcaagagcaacagcgtaatggacggaataataccccgggatccaaggatagcagaaacgcatccaacgatgggcttccaagcggcttgccccagggtcttacgcatgatatgattgtgaaccgcgcagcgacaaccgatgacgccaatacggctaacaagagtgccgctgctgttttaaaggctcagattaagggcctcatggctacacctacgaagaatgaggagaaatcccaatcttccgaagcgcaaacaccaccgtctgctctaggcaaacggaaggcagctctgctggaagatgccgcaagcacaccaggtagtacatcaagtgtcggtgaagaacccgaagatcccgttcgaatgtgggaagagggatatgcggataggtattacgaagccaaattccatgttgatcccaaagatctcgacttccgtcgtcaggtcgcctgggcttataccgaaggactagcatgggtgctcaggtattacttccagggctgcccttcctgggagtggttctatccgtatcattatgcccccttcgcccaagacttcaaggatctcgcgaaaatggagatcaagtttgagaagggcaggattgcaaggccttttgagcaactcatgagtgtgcaacctgctgcctcacgacatgtccttcctgacgttttccatgatctcatgcagaacgaagacagtccgatcatcgatttctacccagaagacttcgtcgtcgaccttaatggtaagaagatggcgtggcaaggcgtagctcttctgccgttcattgaaatgccgcgacttctggctgcaatcgaggaaaagtatcctttgctgagcccagaagatgcggcacgcaatgcgcctggtaaagagtgtctcatactttccgaggcaaatcaagagctgtacgacgacatcataggacaattctattctaaaaagcagggtgcacctaaatacgacctggacgctcgtaagagtcgggggttatcgggaaaaatcgagaagatggaggactatcttccacacggaaccctcgaatacccgctggaacgtaaggggttacctgatgtcgatgatgaccgatcaataaccgtatactatgatatgccaaagtctagtcacacccacaagtcgatgctattacgtggggttcaaatgcctgtgccagctctgaatggtagcgacattgaggagctcaaaggtaaggctcgaaactcgggccgtagctatcgtggtgcttccctcggacagcaccgcggcgacggaagaacggatcgcatgaattatggtccgaactctcaacaatatcagccgcgccataataatggcaacaactacaacaatcgcaattcttaccctgggccgccaccgcctatggtccctccgggatgggctcctcctcctccaccgggcttccccggatttggcagtggcccgccgccgccacccccgaattatcaaggcaaccatcgaggcaattataacaacggctacaacagcggtcgtggtggtccatcaggcgggaaccagggctatgggcagagatatgccccgccagctccgcctggatacaacagttcctacggcgggcagcataatggccatcagggacgagatcgccaatcatatgatggtggtcgcaactaccgtggcggtcgtggtcagggtcataggtactaggacattggcggaaaaggtgtatatgcgtgatgtcactgaaaaagtgtgactatactacgattgtagtgttcagaactgctggcacgagctgttctctaccctcgcggtccgagccgccttgatcagcacggatttgacaaatgttgtggttccgatctatagaaagtaaaaaagaacaaaaagaacaaaaaaatcgaataaaatactga

SEQ ID NO: 39890 - DNA, 7674 bp, Muscodor strobelii
  misc_feature: SGI cDNA ID NO. 573893
  misc_feature: Encodes the peptide sequence at SEQ ID NO 39891
atgagtagtgatgcggacctggtcggttctctggttgaaagactgactaccaggctaccgcaccgcaccggcgctcactcctctgagctcaagcatgaccaggttgtgaccatcacacgcgccagcatcgtcaagctctgtagaaactcgattgccgttatcctccactccctcgtctctctcctcgaagaactctcgcggccgtacaagactctcgcgcagcacccgtcgcatgtcctccagtctgaaatctacgtcgtcgcgctcgctgccgattgttgctctgcgcattggaaggccttgcgcaaggctgccgccgccagtggatcggcaactagcttgggcagtggcttgtcgagcagccagacggtgctgcccaggcctctgcaggacggtctggtgaagcgcgtgttcggttacatcaagcttctccttgagccgatccccgaaggctacatcatacccgcgcgagctatcctcgaagacgaatatgtccgcgagattctcgacccacgctatgcgagcggcccgcgcagcgtcgcctcgagcggctcggacagcgcccgtgacacaatcagttcgcgcgacagcgacgaggagatcgaggagatggagcaacatgtcaagtccatcatagaattcgtgagcgcagccagctggacagtgtccttcgactgcatcaggttcatcacgcacagcaaaaaggtcacaggcccaccacagagcagctcggcgcagggtcaagtcatgtctgaggacgacagactgtcactcgtcgtgttgaggctgctctcatacctctgggtggatgctcagaagctcggccttgtcatgcaagagctcagttctgtattcctccatcttcgcagaatctatcagaataccgtcgctctgactgcgccgcccctcatactgagatggatcgagcgatatccccacgagtttgtgcggctgcatagtcaaaatcgaaagctcgacggaggacccgatacgctcgctgacatgacgcattcactcggcgataatggaagaagacgatcggcactatatcccttccagacaaccctactcatgctcatccctgaagtgtttcaagtggccagcaacctcgtgaaagccaagagtggtaacatggcgaagcgtgtggcgtttctcgagggtcttagaaaggggctacgcaataagaacgagactgcgggtgtttgcttggtgatactcctgcgtgctgcccgccactttccctcagactcagactctgctttcttgagctatgtattggacatacaggatgagttgagagacgctgtattccgccggcaccatccatccggcgacggtattctgtttgagcaggacttaactaccgctgcgctcatcagtcttgtgcacctgaattttgacacatatgtagaccccctgacacaaatctgcactcatccatctgcgccgctatccttcaaaattgccattgtacagacgtgttcgtatttcgctcggaagaagaacgcgcaagattatcgccgcctgtatgtgggtgtagctcagtttgtccaagatcaattaaaggcattggatgcggtttcaacggatctctacatcggtgatcgtcgagcacaccgcaaactgtcagacgcgcgaagctcgaatgaggttatcgtttgcaatattctcaagttcctcgtggcctcgcctttgagtctctttgagagcaaggcacccgaagctcgagacgacgctttttatgaagagatctatcaatcttttgtctcctgcttggtgacggcaaacgacaccgtgagagccctgacgcaacccctggccgaacaaatcttaccaacagacggattgctggcatctgtgcgccaatcaacccctctggattcagaggctttcaagactaaattctggaagctaacatctttcgtcctattggatatatgcgataagtacttcaaaacagaagacatcttcctcctgaagtcaatcaactcttatttgcaaacgggattgttgcttctttcttcctgcctggaattgtgcaatctcaaggaagatattgccgagcgcacagcagtagcaatcacgcttgaatctcttttgcttctgtcactcaatcagccagaaattgagaactgcccaattgtcacttcatcactcggcctttggaacgatgaatgtctcatcttgttgaaagcaagcattgaagctaatgtggcgactttccaactgcccaatgccgatatctacagccagatcgcatcccgcgacttcagattcaccgggatgatggcctttcaaaagcgcacgcgcgctctcctacggaaaatccaagctcccgggccgggcattctcaacgcttgggaacgtgcctttgacaaatggatacatctgtcgaaagatgtgtccagtgctcagtttgatcatctcgatgacaaggttttctccgaatggcggaacctgtctggctttttagcttccctgggcggtatatgtacgatggaattggcctacacagttctggacgagaatgttgtcaatgccctgaggtggatcgaccgggcaacctcgcaggactcggacgagcctatcctcagtcgttatctccgcttgagtactcaacttctcgcatgttccaatgtacgagtaagggagacgatgagagatgttttgtccacagagatatcgccacctctataccagcctttgttcaaagcgttggaaaccgagctagatgtgcttttcactggcgctctcgaaatatcgggcaaaggttctgacggcgaggtcaattttgctgaacaaacagcgtcgctactgaaaacgatcgtggaaaagctggaaacgcctgccgagctcacatctgctgcatctatcgacttcagttcgctatgtctcaacttcgtcaaattcctcgacggcgttccagagagcactttgaccttgcgagtgaagatcaaggtctgccaactgtgcgagcttgtcacaaaaaagaaagaacacctgcatttccgagacgatgtcacgagacggaatcaaatgctggagtatattttcaactggatcgcccgaccacgttctcccgtctcagataactcctacggcatgaatcgacaggacgaggcagcgcgcctgcagaaagaactggataaaagctgtttccgctgtcttgccgccgagctcaagtcacaaatgttccatacgtacttcaaccgctttctgtcgttgttaaaccacgagatcagcgagacatcttccagatcagacggcccagggccgcaagacgagtctgcctcgtcgcttgctattacaatcttgtcaaacctgctgagcgcaaatgtcgacgtcggtctcaaacactccctcaacatcggttaccagaaaaacattgagatccgtatcgccttcgtgaaagtgcttttcaatatcctagttcagggtaccgaattcagcacattgactgataaagctgtcaatgaaaaatacgatgccctgctacagctgcttactcgagatatgagtctcgttgtggctatgagcaccgtttgccctagcagcgaagttgaagagttgacggtagccctcttgaacgtctttgaatatcggggcctcacatttgagctcatggaggcattgatcaaacaggagatcgaggacaccgaaaatgaggccgaaattctacgtcgcaactgcgtggcaaccaaactgctttctgtctatgcgaagtggaaaggacagagatatctcaaagccacattgcaaaaggttgtcgagagattgatgctaacttcgaaagatcttgatctcgaacttgatccgtccaggatatcatcacacgaagaacttcaaaagaatgctcttcagttacggatcgtcgctaaagtattcatcgacgatatatgtgcttctgctgcaaacataccgcctgcatttaggaagatttgcaacatcatatcttccgccgtcatgccgaggttttcagaagccaaatatactgcgataggagctttcatatttttgcgtttcttctgtcctgccattgtcgcacctgagacagagaagctagtcgacgaaactccttccaaagaaatgcggcgaggtctactgctgatcgccaaagtaatccagaatcttgccaacaacgtactattcggtgccaaggaaccatacatgtacccattaaatgatttcttaacagcgcacatctataaagtgacaacctttttgcgtgagatttccgttcctccagaagctctcgatgcaccgcaaactactgagtcatttgactttggatcgtgtgttgttctacatcgttttatgtatgagtattgggataacataaaacaacgtctgatgtcgcaagagaggagagacaacattcgatcaccaaatgaacttgctcgtggccggacaccgattcttgaacctcttcgaactctcatcaccactctaggcccaccgtccttagcggtcacgtggaaccgcccccaaatctctgctaacgattacatctcctattccagattccagaatttcatgcttcgtaacacttctcgtgacaacggcagtttcattgcatctcgtaccatatatgatgggggcgagagtaaggatggccttgcagtaatatgtatgatcctgcgtcatgtcgagacggattgtccagaccaggactttctcctatattcgtatcttaagcatgtaactcggctttggcacaaaccttttggcatcctcattgacgccacttgccacaacggattaggcgaaactcaagagacgatccataagaagcttcaatctctgattacttctgaaatgggcaaaaacctgacacgcgtctatatatacaatatgaacagcacatatagaaaaacttttcgtcgcactcttcgtatggctgacaaagtcgatggagatgcaaatccgttttggcggtccaatcttgaaatccacttactcggaactctgcaagatctccagacacacttccatctcacccaacttcacctaccgaaagaaacgatcagctgcttatctgatacccgctatacctggactccggctacaagactttccaaaactaagggcaagatagacgtgtccatcaaagtgggcagtcaattcgttcagatatcaaccataagaaagcaagaggttcatccaggccttcgcctaaatgctataatcaatgacatattccggttaggagatattgacgaggcgccaacgtccatttcgaccgaagatgattccgcatttgggcttcgagcagacaatggcaaaattgtcatgtatttccaaagcccaaggaagaacgagatcttgcagtctatacgtggtgccaagctgaagtatggaaaggacacaaggacgataaagtcattcgagagactaatccgaccacaagacgtccctgggacgcttttgaacctggctctggccaatcttgctgcgccggaccacagtctcagggtttggtcatacaacctcctcggtgctctctgtcaagcattcaaattcaaagcagcatccaagtttatgtgtaccaaagatatacacatacctctggacccgaatcagttcattatcaacatcagcaagacccttgctctggaagagccccagctgacagctgattttctcaacgaattctttgttgggtgggagaacttctccgatacgcaaaaaccgttgagtcttgcttatgcggcaccctggatatcgagcttacgaacgtcactcctctcggatgagactgaaagcgaaagaggcaaggaaaagattgctgtcatattccaaaagctccttgacgccaccgcgcatgatacctctttgactatgacactcgagcatactgtatggcccgccatatataaggatgagatcttattggacatatttctcgaagagatcatcaaggctgctcttaccgtgggatcacaagatgagcagttccaatcctatacctccattatcatcgcgatgggaactataacactgcgtggcaaggtcatttctcgcctccgtaaagcactaaaccgttcagttctgcgcccaacaagacagctccctgaaaatgctgtgtgggaagaaatttgcatcttattgcagttttgtctcgcactatccttcgattgtggcgttcagtcacaactctacatgccagaaatcttccaccttgtcacaatgctcgcaaatacgggccacttggagtttcgccgatccgttcatcatctactaatcaactcattacacgctgcatatacgtcgttcaaactggacgacgtcaaaatgcccaaattacgtggcgtacttgacgtcgttatggacccgaagagcgaactgttcccggtgccctcaagcttattacgggacgctggatctatgaccacggttcaagagaccggtcacagtcttgtacctattgagaagctcgctactattctctttgatgcgtgcgctgtggcggctccttcggttgacttagcaaatgcttggcgatcgagatggatgagtctggttgccagcactgctttccagaacaatccggccattcagccacgagccttcacagtcatgggatgtcttgctcgggaggagattgatgacgatctattatatcaagttctcgtcgcacttcgcagcagtgtcacccgcttagctgaagatggcagtgtcgaaatgcctaatgcagtagtcaccgccttgtcaaagatgatcagcaagctcagttacacttcccgctacggacttcaactcttctggctcggaatctccctcgtccgtcttatgccaactgctcatctttatggatttgccacccagctgcttgaggctgtattagccaacataggcagctctagtgaaatccgaggcaaaaagacggcacaagttcttcttcacggccgtagcccgctagaagaagctaccctgccacttgacgacatctatggagtccatttcacaccagataacttccacttcgctctttgcgtctgtctcgttcgcggcctcactgagcctactacaaaggcttcgactctccgaatcctttccactctacttgagatgacaacaaattcgttctcgcctcaatctcctcagagctcagatgacttctacaaatcgccgtacatggcattgatacagtcaagagccggaaacatagaagctgtcaaagattgcctttgggcggcggggatcaatcctgcaaacgtggccaacctaaatttaaagcgcaacgtgcgccaagtagaaagtatcagcgacagagatctcttacttcgcaccgccctcgagctagtggattttgccaacttggaggacgagaatcaactcgacacaatgctctggttaaatgaccttgccactgagaggccggcggtcatcggccccttatgctcaactatcacatccatgcttgagggtgttctactgcacgcccagaaaccagaagcgttgaaggcggcgcacagcttgctccgactcttaatgtctgatcctaaatacatagctgcgagagagaacaacaatactctgaacgacgtcctcgaagacatgggattcgagggaatatggcggtcgaactcgttcgtcctcatggagcaagaatatgataagcaggtcattgcgttgacggagaagctcatcgaggacattctgaggtcggcttga

SEQ ID NO: 39891 - protein, 2557 aa, Muscodor strobelii
  misc_feature: SGI Peptide ID NO. 573893
  misc_feature (1207)..(1379): Pfam Id: PF00616 Pfam Desc: GTPase-activator protein for Ras-like GTPase
  misc_feature (696)..(2357): NCBI GI: 56205725 Blast Desc: neurofibromatosis 1 [Mus musculus] gi|56205959|emb|CAI24340.1| neurofibromatosis 1 [Mus musculus]
  misc_feature (743)..(2357): NCBI GI: 114668247 Blast Desc: : neurofibromin isoform 1 [Pan troglodytes]
  misc_feature (743)..(2357): NCBI GI: 4557793 Blast Desc: neurofibromin isoform 2 [Homo sapiens] gi|189165|gb|AAA59924.1| GAP-related protein [Homo sapiens] gi|55375983|gb|AAV50004.1| neurofibromin 1 (neurofibromatosis, 1
  misc_feature (735)..(2357): NCBI GI: 149053572 Blast Desc: neurofibromatosis 1, isoform CRA_a [Rattus norvegicus]
  misc_feature (743)..(2357): NCBI GI: 114668245 Blast Desc: : neurofibromin isoform 3 [Pan troglodytes]
  misc_feature (743)..(2357): NCBI GI: 114668243 Blast Desc: : neurofibromin isoform 2 [Pan troglodytes]
  misc_feature (743)..(2357): NCBI GI: 119600679 Blast Desc: neurofibromin 1 (neurofibromatosis, von Recklinghausen disease, Watson disease), isoform CRA_f [Homo sapiens]
  misc_feature (735)..(2357): NCBI GI: 6981264 Blast Desc: neurofibromin [Rattus norvegicus] gi|13959414|sp|P97526.1|NF1_RAT RecName: Full=Neurofibromin; AltName: Full=Neurofibromatosis-related protein NF-1 [Rattus
  misc_feature (735)..(2357): NCBI GI: 194217322 Blast Desc: : neurofibromin 1 (neurofibromatosis, von Recklinghausen disease, Watson disease) [Equus caballus]
  misc_feature (743)..(2357): NCBI GI: 189172 Blast Desc: neurofibromatosis protein type 1 [Homo sapiens]
MSSDADLVGSLVERLTTRLPHRTGAHSSELKHDQVVTITRASIVKLCRNSIAVILHSLVSLLEELSRPYKTLAQHPSHVLQSEIYVVALAADCCSAHWKALRKAAAASGSATSLGSGLSSSQTVLPRPLQDGLVKRVFGYIKLLLEPIPEGYIIPARAILEDEYVREILDPRYASGPRSVASSGSDSARDTISSRDSDEEIEEMEQHVKSIIEFVSAASWTVSFDCIRFITHSKKVTGPPQSSSAQGQVMSEDDRLSLVVLRLLSYLWVDAQKLGLVMQELSSVFLHLRRIYQNTVALTAPPLILRWIERYPHEFVRLHSQNRKLDGGPDTLADMTHSLGDNGRRRSALYPFQTTLLMLIPEVFQVASNLVKAKSGNMAKRVAFLEGLRKGLRNKNETAGVCLVILLRAARHFPSDSDSAFLSYVLDIQDELRDAVFRRHHPSGDGILFEQDLTTAALISLVHLNFDTYVDPLTQICTHPSAPLSFKIAIVQTCSYFARKKNAQDYRRLYVGVAQFVQDQLKALDAVSTDLYIGDRRAHRKLSDARSSNEVIVCNILKFLVASPLSLFESKAPEARDDAFYEEIYQSFVSCLVTANDTVRALTQPLAEQILPTDGLLASVRQSTPLDSEAFKTKFWKLTSFVLLDICDKYFKTEDIFLLKSINSYLQTGLLLLSSCLELCNLKEDIAERTAVAITLESLLLLSLNQPEIENCPIVTSSLGLWNDECLILLKASIEANVATFQLPNADIYSQIASRDFRFTGMMAFQKRTRALLRKIQAPGPGILNAWERAFDKWIHLSKDVSSAQFDHLDDKVFSEWRNLSGFLASLGGICTMELAYTVLDENVVNALRWIDRATSQDSDEPILSRYLRLSTQLLACSNVRVRETMRDVLSTEISPPLYQPLFKALETELDVLFTGALEISGKGSDGEVNFAEQTASLLKTIVEKLETPAELTSAASIDFSSLCLNFVKFLDGVPESTLTLRVKIKVCQLCELVTKKKEHLHFRDDVTRRNQMLEYIFNWIARPRSPVSDNSYGMNRQDEAARLQKELDKSCFRCLAAELKSQMFHTYFNRFLSLLNHEISETSSRSDGPGPQDESASSLAITILSNLLSANVDVGLKHSLNIGYQKNIEIRIAFVKVLFNILVQGTEFSTLTDKAVNEKYDALLQLLTRDMSLVVAMSTVCPSSEVEELTVALLNVFEYRGLTFELMEALIKQEIEDTENEAEILRRNCVATKLLSVYAKWKGQRYLKATLQKVVERLMLTSKDLDLELDPSRISSHEELQKNALQLRIVAKVFIDDICASAANIPPAFRKICNIISSAVMPRFSEAKYTAIGAFIFLRFFCPAIVAPETEKLVDETPSKEMRRGLLLIAKVIQNLANNVLFGAKEPYMYPLNDFLTAHIYKVTTFLREISVPPEALDAPQTTESFDFGSCVVLHRFMYEYWDNIKQRLMSQERRDNIRSPNELARGRTPILEPLRTLITTLGPPSLAVTWNRPQISANDYISYSRFQNFMLRNTSRDNGSFIASRTIYDGGESKDGLAVICMILRHVETDCPDQDFLLYSYLKHVTRLWHKPFGILIDATCHNGLGETQETIHKKLQSLITSEMGKNLTRVYIYNMNSTYRKTFRRTLRMADKVDGDANPFWRSNLEIHLLGTLQDLQTHFHLTQLHLPKETISCLSDTRYTWTPATRLSKTKGKIDVSIKVGSQFVQISTIRKQEVHPGLRLNAIINDIFRLGDIDEAPTSISTEDDSAFGLRADNGKIVMYFQSPRKNEILQSIRGAKLKYGKDTRTIKSFERLIRPQDVPGTLLNLALANLAAPDHSLRVWSYNLLGALCQAFKFKAASKFMCTKDIHIPLDPNQFIINISKTLALEEPQLTADFLNEFFVGWENFSDTQKPLSLAYAAPWISSLRTSLLSDETESERGKEKIAVIFQKLLDATAHDTSLTMTLEHTVWPAIYKDEILLDIFLEEIIKAALTVGSQDEQFQSYTSIIIAMGTITLRGKVISRLRKALNRSVLRPTRQLPENAVWEEICILLQFCLALSFDCGVQSQLYMPEIFHLVTMLANTGHLEFRRSVHHLLINSLHAAYTSFKLDDVKMPKLRGVLDVVMDPKSELFPVPSSLLRDAGSMTTVQETGHSLVPIEKLATILFDACAVAAPSVDLANAWRSRWMSLVASTAFQNNPAIQPRAFTVMGCLAREEIDDDLLYQVLVALRSSVTRLAEDGSVEMPNAVVTALSKMISKLSYTSRYGLQLFWLGISLVRLMPTAHLYGFATQLLEAVLANIGSSSEIRGKKTAQVLLHGRSPLEEATLPLDDIYGVHFTPDNFHFALCVCLVRGLTEPTTKASTLRILSTLLEMTTNSFSPQSPQSSDDFYKSPYMALIQSRAGNIEAVKDCLWAAGINPANVANLNLKRNVRQVESISDRDLLLRTALELVDFANLEDENQLDTMLWLNDLATERPAVIGPLCSTITSMLEGVLLHAQKPEALKAAHSLLRLLMSDPKYIAARENNNTLNDVLEDMGFEGIWRSNSFVLMEQEYDKQVIALTEKLIEDILRSA

SEQ ID NO: 39892 - DNA, 5806 bp, Muscodor strobelii
  misc_feature: SGI EST ID NO. CUFF.96427.0
  misc_feature: Variant of the nucleotide sequence at SEQ ID NO 39890
ctcaacgcttgggaacgtgcctttgacaaatggatacatctgtcgaaagatgtgtccagtgctcagtttgatcatctcgatgacaaggttttctccgaatggcggaacctgtctggctttttagcttccctgggcggtatatgtacgatggaattggcctacacagttctggacgagaatgttgtcaatgccctgaggtggatcgaccgggcaacctcgcaggactcggacgagcctatcctcagtcgttatctccgcttgagtactcaacttctcgcatgttccaatgtacgagtaagggagacgatgagagatgttttgtccacagagatatcgccacctctataccagcctttgttcaaagcgttggaaaccgagctagatgtgcttttcactggcgctctcgaaatatcgggcaaaggttctgacggcgaggtcaattttgctgaacaaacagcgtcgctactgaaaacgatcgtggaaaagctggaaacgcctgccgagctcacatctgctgcatctatcgacttcagttcgctatgtctcaacttcgtcaaattcctcgacggcgttccagagagcactttgaccttgcgagtgaagatcaaggtctgccaactgtgcgagcttgtcacaaaaaagaaagaacacctgcatttccgagacgatgtcacgagacggaatcaaatgctggagtatattttcaactggatcgcccgaccacgttctcccgtctcagataactcctacggcatgaatcgacaggacgaggcagcgcgcctgcagaaagaactggataaaagctgtttccgctgtcttgccgcgttgacttacagacttcctcttcaaccggggagaaggacaaagcgatgtcggcactagcgagctcaagtcacaaatgttccatacgtacttcaaccgctttctgtcgttgttaaaccacgagatcagcgagacatcttccagatcagacggcccagggccgcaagacgagtctgcctcgtcgcttgctattacaatcttgtcaaacctgctgagcgcaaatgtcgacgtcggtctcaaacactccctcaacatcggttaccagaaaaacattgagatccgtatcgccttcgtgaaagtgcttttcaatatcctagttcagggtaccgaattcagcacattgactgataaagctgtcaatgaaaaatacgatgccctgctacagctgcttactcgagatatgagtctcgttgtggctatgagcaccgtttgccctagcagcgaagttgaagagttgacggtagccctcttgaacgtctttgaatatcggggcctcacatttgagctcatggaggcattgatcaaacaggagatcgaggacaccgaaaatgaggccgaaattctacgtcgcaactgcgtggcaaccaaactgctttctgtctatgcgaagtggaaaggacagagatatctcaaagccacattgcaaaaggttgtcgagagattgatgctaacttcgaaagatcttgatctcgaacttgatccgtccaggatatcatcacacgaagaacttcaaaagaatgctcttcagttacggatcgtcgctaaagtattcatcgacgatatatgtgcttctgctgcaaacataccgcctgcatttaggaagatttgcaacatcatatcttccgccgtcatgccgaggttttcagaagccaaatatactgcgataggagctttcatatttttgcgtttcttctgtcctgccattgtcgcacctgagacagagaagctagtcgacgaaactccttccaaagaaatgcggcgaggtctactgctgatcgccaaagtaatccagaatcttgccaacaacgtactattcggtgccaaggaaccatacatgtacccattaaatgatttcttaacagcgcacatctataaagtgacaacctttttgcgtgagatttccgttcctccagaagctctcgatgcaccgcaaactactgagtcatttgactttggatcgtgtgttgttctacatcgttttatgtatgagtattgggataacataaaacaacgtctgatgtcgcaagagaggagagacaacattcgatcaccaaatgaacttgctcgtggccggacaccgattcttgaacctcttcgaactctcatcaccactctaggcccaccgtccttagcggtcacgtggaaccgcccccaaatctctgctaacgattacatctcctattccagattccagaatttcatgcttcgtaacacttctcgtgacaacggcagtttcattgcatctcgtaccatatatgatgggggcgagagtaaggatggccttgcagtaatatgtatgatcctgcgtcatgtcgagacggattgtccagaccaggactttctcctatattcgtatcttaagcatgtaactcggctttggcacaaaccttttggcatcctcattgacgccacttgccacaacggattaggcgaaactcaagagacgatccataagaagcttcaatctctgattacttctgaaatgggcaaaaacctgacacgcgtctatatatacaatatgaacagcacatatagaaaaacttttcgtcgcactcttcgtatggctgacaaagtcgatggagatgcaaatccgttttggcggtccaatcttgaaatccacttactcggaactctgcaagatctccagacacacttccatctcacccaacttcacctaccgaaagaaacgatcagctgcttatctgatacccgctatacctggactccggctacaagactttccaaaactaagggcaagatagacgtgtccatcaaagtgggcagtcaattcgttcagatatcaaccataagaaagcaagaggttcatccaggccttcgcctaaatgctataatcaatgacatattccggttaggagatattgacgaggcgccaacgtccatttcgaccgaagatgattccgcatttgggcttcgagcagacaatggcaaaattgtcatgtatttccaaagcccaaggaagaacgagatcttgcagtctatacgtggtgccaagctgaagtatggaaaggacacaaggacgataaagtcattcgagagactaatccgaccacaagacgtccctgggacgcttttgaacctggctctggccaatcttgctgcgccggaccacagtctcagggtttggtcatacaacctcctcggtgctctctgtcaagcattcaaattcaaagcagcatccaagtttatgtgtaccaaagatatacacatacctctggacccgaatcagttcattatcaacatcagcaagacccttgctctggaagagccccagctgacagctgattttctcaacgaattctttgttgggtgggagaacttctccgatacgcaaaaaccgttgagtcttgcttatgcggcaccctggatatcgagcttacgaacgtcactcctctcggatgagactgaaagcgaaagaggcaaggaaaagattgctgtcatattccaaaagctccttgacgccaccgcgcatgatacctctttgactatgacactcgagcatactgtatggcccgccatatataaggatgagatcttattggacatatttctcgaagagatcatcaaggctgctcttaccgtgggatcacaagatgagcagttccaatcctatacctccattatcatcgcgatgggaactataacactgcgtggcaaggtcatttctcgcctccgtaaagcactaaaccgttcagttctgcgcccaacaagacagctccctgaaaatgctgtgtgggaagaaatttgcatcttattgcagttttgtctcgcactatccttcgattgtggcgttcagtcacaactctacatgccagaaatcttccaccttgtcacaatgctcgcaaatacgggccacttggagtttcgccgatccgttcatcatctactaatcaactcattacacgctgcatatacgtcgttcaaactggacgacgtcaaaatgcccaaattacgtggcgtacttgacgtcgttatggacccgaagagcgaactgttcccggtgccctcaagcttattacgggacgctggatctatgaccacggttcaagagaccggtcacagtcttgtacctattgagaagctcgctactattctctttgatgcgtgcgctgtggcggctccttcggttgacttagcaaatgcttggcgatcgagatggatgagtctggttgccagcactgctttccagaacaatccggccattcagccacgagccttcacagtcatgggatgtcttgctcgggaggagattgatgacgatctattatatcaagttctcgtcgcacttcgcagcagtgtcacccgcttagctgaagatggcagtgtcgaaatgcctaatgcagtagtcaccgccttgtcaaagatgatcagcaagctcagttacacttcccgctacggacttcaactcttctggctcggaatctccctcgtccgtcttatgccaactgctcatctttatggatttgccacccagctgcttgaggctgtattagccaacataggcagctctagtgaaatccgaggcaaaaagacggcacaagttcttcttcacggccgtagcccgctagaagaagctaccctgccacttgacgacatctatggagtccatttcacaccagataacttccacttcgctctttgcgtctgtctcgttcgcggcctcactgagcctactacaaaggcttcgactctccgaatcctttccactctacttgagatgacaacaaattcgttctcgcctcaatctcctcagagctcagatgacttctacaaatcgccgtacatggcattgatacagtcaagagccggaaacatagaagctgtcaaagattgcctttgggcggcggggatcaatcctgcaaacgtggccaacctaaatttaaagcgcaacgtgcgccaagtagaaagtatcagcgacagagatctcttacttcgcaccgccctcgagctagtggattttgccaacttggaggacgagaatcaactcgacacaatgctctggttaaatgaccttgccactgagaggccggcggtcatcggccccttatgctcaactatcacatccatgcttgagggtgttctactgcacgcccagaaaccagaagcgttgaaggcggcgcacagcttgctccgactcttaatgtctgatcctaaatacatagctgcgagagagaacaacaatactctgaacgacgtcctcgaagacatgggattcgagggaatatggcggtcgaactcgttcgtcctcatggagcaagaatatgataagcaggtcattgcgttgacggagaagctcatcgaggacattctgaggtcggcttgagtgggctcttcgagaggacgagaacatatgggagtagaaatggtctacatatgacgccacattcaaagagaacagagaaggagatcggggtctacgcgcagcctgatctcattgattcgacttttatgaaggaaaatggaaagagtagaagagaacattatttgaacatagtaaaatacgtcgacatcaaaagtagcggccgagtcgtacatagaacgagatagcgaagcgcagcattttatatggtgttatagttcccgttcaattatgcgataacttgaacctgttctttgttaccatcgcatacctattacagtttctaattacctatcgtgtctgtagcacagcttgcatcgcagcagttgcccctaatttcgcaattaaaccaacaaaagagatgaataggtcatgacgtatgaaaaa

SEQ ID NO: 39893 - DNA, 999 bp, Muscodor strobelii
  misc_feature: SGI cDNA ID NO. 573894
  misc_feature: Encodes the peptide sequence at SEQ ID NO 39894
atggattcacaaacctttcacctcttttcccatctcccagctgagttgaggctcatgatttgggaagccgccttacatcctcacgaacctagcgcccagttcttcacactcgttaccaacaggaaatgtttccgcgacgtcgcatttcacacgaagtccgaaaacaataaaggatccgacttggccgccccttgctctcgacagactggagctttatcatggactcataataacttatccgcgtacatcatcgatcacggcctctggacggcatgctgggaatcaagagctgtcatgcttaaatatcatcagcgccgaggaaaagccattgatgagtattctttgatgtgcacacatgagtttggagagtcacaattaattccgcaagctacggttaaaggcacaggaatcgatgagaactatgaacgacggaacatctcgttcgatcctgatctcgatcttctatccttccatcttccacttaacacagcaggcttctgtcctgatattgccagcaccgtatggcgtctgacgttccgtccaagaaacgttgccgtcgaatacataccagaaatgaggcggactcttatcgggccactaccactagttcgcctagaacacctcgctctgctggaagcaataacctacaatgcgcaatccgcattgattctccccacattctggtttattgattatcaaatcattttaaagccaggagcatcctatccgagtgaccggactacattcaaaggcctcggttgcaagtttgtcgaaatgaaagagacagatgcgtgctgggatgttatcaagaattctcaggtgttcgtcaacggtattcagcgcaccattacccgctcgtctgatcatgaggtcttcgcgatgatgagccaaattacctgtgcggtattgagacagggaccaccacaatggattggtttacccccaggtacaaaccgtcgtattgtcagagttcgggcccttgcttgtgtacctgagtga

SEQ ID NO: 39894 - protein, 332 aa, Muscodor strobelii
  misc_feature: SGI Peptide ID NO. 573894
  misc_feature (3)..(259): NCBI GI: 256730282 Blast Desc: NECHADRAFT_82628 [Nectria haematococca mpVI 77-13-4]
  misc_feature (3)..(264): NCBI GI: 171677638 Blast Desc: protein product [Podospora anserina] gi|170936887|emb|CAP61546.1| protein product [Podospora anserina]
  misc_feature (6)..(260): NCBI GI: 116181360 Blast Desc: [Chaetomium globosum CBS 148.51] gi|88185605|gb|EAQ93073.1| [Chaetomium globosum CBS 148.51]
  misc_feature (5)..(102): NCBI GI: 256728568 Blast Desc: NECHADRAFT_85997 [Nectria haematococca mpVI 77-13-4]
  misc_feature (6)..(101): NCBI GI: 256735652 Blast Desc: NECHADRAFT_75723 [Nectria haematococca mpVI 77-13-4]
  misc_feature (3)..(114): NCBI GI: 256730061 Blast Desc: NECHADRAFT_82684 [Nectria haematococca mpVI 77-13-4]
  misc_feature (3)..(260): NCBI GI: 256726570 Blast Desc: NECHADRAFT_79659 [Nectria haematococca mpVI 77-13-4]
  misc_feature (5)..(263): NCBI GI: 46117180 Blast Desc: FG04432.1 [Gibberella zeae PH-1]
  misc_feature (3)..(110): NCBI GI: 116205589 Blast Desc: [Chaetomium globosum CBS 148.51] gi|88176806|gb|EAQ84274.1| [Chaetomium globosum CBS 148.51]
  misc_feature (1)..(104): NCBI GI: 256723672 Blast Desc: NECHADRAFT_86744 [Nectria haematococca mpVI 77-13-4]
MDSQTFHLFSHLPAELRLMIWEAALHPHEPSAQFFTLVTNRKCFRDVAFHTKSENNKGSDLAAPCSRQTGALSWTHNNLSAYIIDHGLWTACWESRAVMLKYHQRRGKAIDEYSLMCTHEFGESQLIPQATVKGTGIDENYERRNISFDPDLDLLSFHLPLNTAGFCPDIASTVWRLTFRPRNVAVEYIPEMRRTLIGPLPLVRLEHLALLEAITYNAQSALILPTFWFIDYQIILKPGASYPSDRTTFKGLGCKFVEMKETDACWDVIKNSQVFVNGIQRTITRSSDHEVFAMMSQITCAVLRQGPPQWIGLPPGTNRRIVRVRALACVPE

SEQ ID NO: 39895 - DNA, 291 bp, Muscodor strobelii
  misc_feature: SGI EST ID NO. CUFF.96354.0
  misc_feature: Variant of the nucleotide sequence at SEQ ID NO 39893
caggaatcgatgagaactatgaacgacggaacatctcgttcgatcctgatctcgatcttctatccttccatcttccacttaacacagcaggcttctgtcctgatattgccagcaccgtatggcgtctgacgttccgtccaagaaacgttgccgtcgaatacataccagaaatgaggcggactcttatcgggccactaccactagttcgcctagaacacctcgctctgctggaagcaataacctacaatgcgcaatccgcattgattctccccacattctggtttattgatt

SEQ ID NO: 39896 - DNA, 1356 bp, Muscodor strobelii
  misc_feature: SGI cDNA ID NO. 573895
  misc_feature: Encodes the peptide sequence at SEQ ID NO 39897
atggcatactcacggagcctatcgcatggcgagattcgcctcatcgagttgctgcccggcacaactttaccattacagatccaattacattcggcagaattgaatggccagccggtgtttagtgctttgtcttactgttggggcgcccaagaagtaaccgagcgcatcatttgcaatgacggcgagttcatgataacggcgaatctgcattcagcgttgcatgagcttcgggagacgtctgaatctcttcaaatatgggtcgatgcagtatgcatcaatcaagccgatactcaagagaagagccatcaagtggctttgatgggcaagatctacagttcagcctctattgtgtacgtctggcttggtgaggatacggagggtgatgatagcgaagactccatcagattattgagagccatccaggagacatggacggcagatgaaagcatccaagttatagatatcgattattcgactactgagggtagactgccgccactgaacaacctccgatggagaaacttcctccggctctttcagaggccatggttccataggctctggatcattcaagaagtgactttagctaaagaagtcatcatacgttctggtcgaaatagatgtgagggggcactctttttcgaaatgctgtctgacggcctgtggcgaggcttaattccaaaacttctctttcagcacgaattcgaagatcccgatatgctagaccgttaccaagccgcgaatctctggaacatgttgttaacgaagcagcaatatttggagtccaacaacaagggtccgggtgtgggcttgcttcctctgatacacagacatcgccatgcgagtaccacagatcctcgcgacaagatcttcggtctcctcggcttggcaagggtaagctctccaggcgacaagtcaaatgaattcaggaaaccagactacaatatgaccctgagagacgtttatatgcgtttcgcgagggtttgtattttgtcagaagttcatctagacctgcttagtgttacaaaaccaccgttccctagtcaactagaagatctcgccctgccgtcatggtgtccggactggaggataaaggaagggtcttccatatcgtgtattttggacagcaacactggcacgcactggcgggcttgtggggactcgacatcgaaagactctgtgcaagtattggaagaaaaactcatagtccaggggcatatatgcgaccgcattgttgagacgggcgtcactttcaacatcttcgacggctacagagatccgaaagacaccgggtcggctttgattctaatgcgcatgtctctagttccgtccactataagcgcgctttataactag

SEQ ID NO: 39897 - protein, 451 aa, Muscodor strobelii
  misc_feature: SGI Peptide ID NO. 573895
  misc_feature (40)..(192): Pfam Id: PF06985 Pfam Desc: Heterokaryon incompatibility protein (HET)
  misc_feature (12)..(362): NCBI GI: 226287224 Blast Desc: conserved [Paracoccidioides brasiliensis Pb18]
  misc_feature (12)..(411): NCBI GI: 225683598 Blast Desc: [Paracoccidioides brasiliensis Pb03]
  misc_feature (12)..(425): NCBI GI: 115401102 Blast Desc: [Aspergillus terreus NIH2624] gi|114190080|gb|EAU31780.1| [Aspergillus terreus NIH2624]
  misc_feature (12)..(411): NCBI GI: 261202540 Blast Desc: conserved [Ajellomyces dermatitidis SLH14081] gi|239590581|gb|EEQ73162.1| conserved [Ajellomyces dermatitidis SLH14081]
  misc_feature (12)..(411): NCBI GI: 239612306 Blast Desc: conserved [Ajellomyces dermatitidis ER-3]
  misc_feature (11)..(424): NCBI GI: 238498684 Blast Desc: conserved [Aspergillus flavus NRRL3357] gi|220693851|gb|EED50196.1| conserved [Aspergillus flavus NRRL3357]
  misc_feature (11)..(415): NCBI GI: 256721216 Blast Desc: NECHADRAFT_101059 [Nectria haematococca mpVI 77-13-4]
  misc_feature (12)..(365): NCBI GI: 171691096 Blast Desc: protein product [Podospora anserina] gi|170945496|emb|CAP71608.1| protein product [Podospora anserina]
  misc_feature (11)..(417): NCBI GI: 115449831 Blast Desc: [Aspergillus terreus NIH2624] gi|114187656|gb|EAU29356.1| [Aspergillus terreus NIH2624]
  misc_feature (12)..(362): NCBI GI: 256721799 Blast Desc: NECHADRAFT_53281 [Nectria haematococca mpVI 77-13-4]
MAYSRSLSHGEIRLIELLPGTTLPLQIQLHSAELNGQPVFSALSYCWGAQEVTERIICNDGEFMITANLHSALHELRETSESLQIWVDAVCINQADTQEKSHQVALMGKIYSSASIVYVWLGEDTEGDDSEDSIRLLRAIQETWTADESIQVIDIDYSTTEGRLPPLNNLRWRNFLRLFQRPWFHRLWIIQEVTLAKEVIIRSGRNRCEGALFFEMLSDGLWRGLIPKLLFQHEFEDPDMLDRYQAANLWNMLLTKQQYLESNNKGPGVGLLPLIHRHRHASTTDPRDKIFGLLGLARVSSPGDKSNEFRKPDYNMTLRDVYMRFARVCILSEVHLDLLSVTKPPFPSQLEDLALPSWCPDWRIKEGSSISCILDSNTGTHWRACGDSTSKDSVQVLEEKLIVQGHICDRIVETGVTFNIFDGYRDPKDTGSALILMRMSLVPSTISALYN

SEQ ID NO: 39898 - DNA, 1487 bp, Muscodor strobelii
  misc_feature: SGI EST ID NO. CUFF.96360.0
  misc_feature: Variant of the nucleotide sequence at SEQ ID NO 39896
ccataggctctggatcattcaagaagtgactttagctaaagaagtcatcatacgttctggtcgaaatagatgtgagggggcactctttttcgaaatgctgtctgacggcctgtggcgaggcttaattccaaaacttctctttcagcacgaattcgaagatcccgatatgctagaccgttaccaagccgcgaatctctggaacatgttgttaacgaagcagcaatatttggagtccaacaacaagggtccgggtgtgggcttgcttcctctgatacacagacatcgccatgcgagtaccacagatcctcgcgacaagatcttcggtctcctcggcttggcaagggtaagctctccaggcgacaagtcaaatgaattcaggaaaccagactacaatatgaccctgagagacgtttatatgcgtttcgcgagggtttgtattttgtcagaagttcatctagacctgcttagtgttacaaaaccaccgttccctagtcaactagaagatctcgccctgccgtcatggtgtccggactggaggataaaggaagggtcttccatatcgtgtattttggacagcaacactggcacgcactggcgggcttgtggggactcgacatcgaaagactctgtgcaagtattggaagaaaaactcatagtccaggggcatatatgcgaccgcattgttgagacgggcgtcactttcaacatcttcgacggctacagagatccgaaagacaccgggtcggctttgattctaatgcgcatgtctctagttccgtccactataagcgcgctttataactagcagaaggtttgcaaatgcaagcgcgggtcgttgtatcccactggggaggaccgcctgaaagtgttcatgaggttgacgcttggtattcggggcgacaacgcatctaagatcgcgcacaatctactcaatctaatgcgattggctggacgtttgatagccatgttacaaagcctcggtctccagagtttatctgaaaaactgtatagtcttgtaacagtaatccttgttgtgccgatcactttcttcacctttatcgcaatcaaacctagagtttctgtcaactctttcgttcgaataagaaaggtggcacgaacagagaactcgtacttcgcgttgacaccagctcaaacggcagaaggagatgtcattgtcttggccaagggttctcggacccctttgatattgaggagcacggaaaatccggcagaatggactctcattggggatgccttaataccaggattgatgaaaggcgagcgtttcactgaggatgaatgctatcctatcacgattatctgatcgcgtttccggtttgcgagctttgcaccctgaagctgcgatgtgaccggtaattattgacttgaactgaattggtttcgaagcgtctttttacggaggtgaaaggtgactgatcgaatagattggcgaataacactagtatatatacatatttgtagccttg

SEQ ID NO: 39899 - DNA, 1194 bp, Muscodor strobelii
  misc_feature: SGI cDNA ID NO. 573896
  misc_feature: Encodes the peptide sequence at SEQ ID NO 39900
atgaagatgcgaccccatattttgaacgtggtggtgggattgataacagggtgctccatgtgcctcgcccgagtagtctctgtgcagaccagggggattggaaacatgtccaagacagaatggggagcacaatgtcgagatctgatgattcccgttcatgtgtcaaaaacatctgagcggaattttactatcggcgactacgacgttggcgtcctatatgctatcaccgggcgagaagtgcttatggaagccgattatgagatttccgctcgcttctgcgaacctaatccagatcaggaggcgcacgaggatacgctgcagcttctcgttcatggctcgatgtataacaaagccatgtgggactttccgtacaagccagacgcatatagctggactcgattcacgaatttgaacgggttctctacgctggctgttgatcttattggcgctggcaacagcacacatccggacggcctcttggaagcgcagatcgaagtcttcgtacagacacttcacgatgtcgttcagcaactgaaaacaacgacacttctcggaaagacatttggccaaatcgcatatgtcggcttctcagttggtgccatcgtcggaaatggcctcgcggatagatatcctaatgatgttgacatgttacttttcctagggataacctggatgaaagactacatctaccctgttttcatggctggcggccagacagctgctgcgaaagtcgatcctcaaaaatggggcaagctcgaagaatactaccagacgcaacccacaatcctgggtcgggaactatctctgtactacggcgactacgagaccggggccttggagatggattacgctatgcgtgatcttgatactcttggagctgccgtggcatttacctcccatctgatcacagctgaaaactttacgggacccgttttcctgggtatcggcgagaatgatggaattttctgtggaggctcatgtggcgataaaccgtacggagtctatgacagctttccacacgcctctctgcacaaaatcaggatttacccaaaggcaggacatgcattgatgtttcacgagtgtgctcgagacctccagaaagatgtggcggatttcttgaaggggcagtcctcgggacctcgagctcgtagccaattgagttcacgttctattcagcagccgtgtcttggataa

SEQ ID NO: 39900 - protein, 397 aa, Muscodor strobelii
  misc_feature: SGI Peptide ID NO. 573896
  misc_feature (45)..(376): NCBI GI: 189207292 Blast Desc: conserved [Pyrenophora tritici-repentis Pt-1C-BFP] gi|187976073|gb|EDU42699.1| conserved [Pyrenophora tritici-repentis Pt-1C-BFP]
  misc_feature (14)..(373): NCBI GI: 261361255 Blast Desc: conserved [Verticillium albo-atrum VaMs.102]
  misc_feature (15)..(373): NCBI GI: 242816936 Blast Desc: valacyclovir hydrolase, [Talaromyces stipitatus ATCC 10500] gi|218713315|gb|EED12739.1| valacyclovir hydrolase, [Talaromyces stipitatus ATCC 10500]
  misc_feature (45)..(374): NCBI GI: 171677300 Blast Desc: protein product [Podospora anserina] gi|170936718|emb|CAP61376.1| protein product [Podospora anserina]
  misc_feature (23)..(374): NCBI GI: 115387052 Blast Desc: [Aspergillus terreus NIH2624] gi|114191065|gb|EAU32765.1| [Aspergillus terreus NIH2624]
  misc_feature (86)..(373): NCBI GI: 116194023 Blast Desc: CHGG_06729 [Chaetomium globosum CBS 148.51] gi|88182642|gb|EAQ90110.1| CHGG_06729 [Chaetomium globosum CBS 148.51]
  misc_feature (81)..(376): NCBI GI: 145254751 Blast Desc: An18g02752 [Aspergillus niger] gi|134084319|emb|CAK48659.1| protein product [Aspergillus niger]
  misc_feature (86)..(373): NCBI GI: 255930811 Blast Desc: Pc12g00590 [Penicillium chrysogenum Wisconsin 54-1255] gi|211581581|emb|CAP79686.1| Pc12g00590 [Penicillium chrysogenum Wisconsin 54-1255]
  misc_feature (86)..(373): NCBI GI: 85090255 Blast Desc: NCU07350 [Neurospora crassa OR74A] gi|28919681|gb|EAA29094.1| [Neurospora crassa OR74A]
  misc_feature (44)..(376): NCBI GI: 121712070 Blast Desc: conserved [Aspergillus clavatus NRRL 1] gi|119401802|gb|EAW12224.1| conserved [Aspergillus clavatus NRRL 1]
MKMRPHILNVVVGLITGCSMCLARVVSVQTRGIGNMSKTEWGAQCRDLMIPVHVSKTSERNFTIGDYDVGVLYAITGREVLMEADYEISARFCEPNPDQEAHEDTLQLLVHGSMYNKAMWDFPYKPDAYSWTRFTNLNGFSTLAVDLIGAGNSTHPDGLLEAQIEVFVQTLHDVVQQLKTTTLLGKTFGQIAYVGFSVGAIVGNGLADRYPNDVDMLLFLGITWMKDYIYPVFMAGGQTAAAKVDPQKWGKLEEYYQTQPTILGRELSLYYGDYETGALEMDYAMRDLDTLGAAVAFTSHLITAENFTGPVFLGIGENDGIFCGGSCGDKPYGVYDSFPHASLHKIRIYPKAGHALMFHECARDLQKDVADFLKGQSSGPRARSQLSSRSIQQPCLG

SEQ ID NO: 39901 - DNA, 1974 bp, Muscodor strobelii
  misc_feature: SGI cDNA ID NO. 573897
  misc_feature: Elevated expression when VOC is produced
  misc_feature: Encodes the peptide sequence at SEQ ID NO 39902
atgtcgacggacaaggaggtcacccctgccacaggccccgagatctcgcacaacacagcagattcggcacctgaagtcatcgtcgatgcagagaaagggcgcgccggttccgtacctcatgtcgatattaatcaaaatctgaatgctaagattcgaaatccgttggcgggaatcccgcgtgagcaattgctcgaagaagtgacagcatttgccaacaagcatggtttagaagagcacatgacaacattgcggaagggcgcactcgttgctcaggatcccagctgctttgaagacttacagggagaggtggcactcaccgaagacgagatttatgccctcaaacgcgagattacacacaaatggcgagttccgagaatgctgtatctcactatcatcacttgcagtatcggagccgccgttcaaggctgggaccaagagggcagtaatggtgcaaacctcacgttccctgtgcagttcggcattggagggagaacagatcacgatgttttcctcgtagggctcatcaactcagcaccatatataggctcggccttgataggatgttggtgctctgacccactgaacaatatctttggacgacgaggcaccatcttcatctctgctatattctgtctgcttacaccaattggcggggctgtgacccagaattgggaacagcttctagtaacgcgtttactgttaggcgttggcatgggtatcaaagcatcgactgtacctattttcgcagcagaaaacagtcctgcagccattcgtggggcactggtcatgacctggcaattatggactgctttcggtatttggcttgggacaattgctaatctagtcgttggcaaagttggtccgatagcctggcgattgcagattggttcagcattcataccagcgattccactcgtggctcttatcctgttttgtccggaaagtcctcgatggtacatcaagaaaggtcgatacgccgatgccatgagatcgctcctagtcttgcgaaatgaccctatccaggcagctcgtgatctctatgcaatccaagcacaggtccaagttgaagctgaagctattggtgattcctcgtatatcaaacgatttttcgaattgtggacaattccacgcattcgacgagcaacaggcgctgcatttgtcgtcatgattgcgcagcaactgtgcggaatcaatatcattgctttctattcttcgacggttttcagagaggcgggagcgagtgactacacagctcttcttgcatcgttcggcttcggagccatcaattttgggttcgcttggccggctatctggacaatcgacaccttcggacgccgctctttgctgcttttcaccttcccaaacatggcctggtcccttctcgccgccgggctattcaaccttctcaatggaaatagcgcggcacacgttgctgttgttgctgtattcatctacatcttcgctgcattttactctcccggcgaaggccctgtccctttcgcctacagtgccgaggtcttcccgctctcgcatcgtgaggttggcatggcttttgctgtcgcgacaaatctcttctgggctgccgtattgtcgatcacgtttccgaagattcttgattcgcttggtgttgttggcgcattcggtctctacgctggtttcaatgttgtggggtttgtcttgatcttcctgtgggttcccgagaccaaacagcgtacactcgaagagctggattacgtcttcgccgttcctagcagagtgtttatcaaatatagcttcaccaaggcggtaccttggtggtttcagcgctatatcctatgcaataagcgagcaaccctcgagccgctgtaccagtttgatagtccacctcccgttgcccctgtggaaaagcgagactcctctgtcgataaaaaagagaaagagggtgaacctactgctacaacaacaggtgccgaaattcagacagcaaacagctga

SEQ ID NO: 39902 - protein, 657 aa, Muscodor strobelii
  misc_feature: SGI Peptide ID NO. 573897
  misc_feature (134)..(531): Pfam Id: PF07690 Pfam Desc: Major Facilitator Superfamily
  misc_feature (129)..(580): Pfam Id: PF00083 Pfam Desc: Sugar (and other) transporter
  misc_feature (40)..(651): NCBI GI: 154299617 Blast Desc: BC1G_10771 [Botryotinia fuckeliana B05.10] gi|150857263|gb|EDN32455.1| BC1G_10771 [Botryotinia fuckeliana B05.10]
  misc_feature (31)..(620): NCBI GI: 46107894 Blast Desc: FG00830.1 [Gibberella zeae PH-1]
  misc_feature (31)..(650): NCBI GI: 256734642 Blast Desc: [Nectria haematococca mpVI 77-13-4]
  misc_feature (31)..(619): NCBI GI: 171680719 Blast Desc: protein product [Podospora anserina] gi|170939987|emb|CAP65213.1| protein product [Podospora anserina]
  misc_feature (29)..(619): NCBI GI: 255942425 Blast Desc: Pc18g01360 [Penicillium chrysogenum Wisconsin 54-1255] gi|211586714|emb|CAP94360.1| Pc18g01360 [Penicillium chrysogenum Wisconsin 54-1255]
  misc_feature (1)..(636): NCBI GI: 258563778 Blast Desc: UREG_07407 [Uncinocarpus reesii 1704] gi|237908141|gb|EEP82542.1| UREG_07407 [Uncinocarpus reesii 1704]
  misc_feature (4)..(619): NCBI GI: 212526342 Blast Desc: galactose-proton symport, [Penicillium marneffei ATCC 18224] gi|210072726|gb|EEA26813.1| galactose-proton symport, [Penicillium marneffei ATCC 18224]
  misc_feature (42)..(620): NCBI GI: 256729052 Blast Desc: [Nectria haematococca mpVI 77-13-4]
  misc_feature (49)..(652): NCBI GI: 225681726 Blast Desc: D-xylose-proton symporter [Paracoccidioides brasiliensis Pb03]
  misc_feature (50)..(652): NCBI GI: 225556495 Blast Desc: sugar transporter [Ajellomyces capsulatus G186AR]
  misc_feature: Useful for introducing or modulating the production of volatile compounds
MSTDKEVTPATGPEISHNTADSAPEVIVDAEKGRAGSVPHVDINQNLNAKIRNPLAGIPREQLLEEVTAFANKHGLEEHMTTLRKGALVAQDPSCFEDLQGEVALTEDEIYALKREITHKWRVPRMLYLTIITCSIGAAVQGWDQEGSNGANLTFPVQFGIGGRTDHDVFLVGLINSAPYIGSALIGCWCSDPLNNIFGRRGTIFISAIFCLLTPIGGAVTQNWEQLLVTRLLLGVGMGIKASTVPIFAAENSPAAIRGALVMTWQLWTAFGIWLGTIANLVVGKVGPIAWRLQIGSAFIPAIPLVALILFCPESPRWYIKKGRYADAMRSLLVLRNDPIQAARDLYAIQAQVQVEAEAIGDSSYIKRFFELWTIPRIRRATGAAFVVMIAQQLCGINIIAFYSSTVFREAGASDYTALLASFGFGAINFGFAWPAIWTIDTFGRRSLLLFTFPNMAWSLLAAGLFNLLNGNSAAHVAVVAVFIYIFAAFYSPGEGPVPFAYSAEVFPLSHREVGMAFAVATNLFWAAVLSITFPKILDSLGVVGAFGLYAGFNVVGFVLIFLWVPETKQRTLEELDYVFAVPSRVFIKYSFTKAVPWWFQRYILCNKRATLEPLYQFDSPPPVAPVEKRDSSVDKKEKEGEPTATTTGAEIQTANS

SEQ ID NO: 39903 - DNA, 2610 bp, Muscodor strobelii
  misc_feature: SGI EST ID NO. CUFF.96373.0
  misc_feature: Variant of the nucleotide sequence at SEQ ID NO 39901
gcagaagtgagttgatgttacattagcgaatatgcgctacactgaaccatcataagtagcaagaaccccaaattgtttgcatggcgcatgctcttttctcttgtgtcccaaaaagctgccggcaatagtgtgtatggccatctgattctacacctaccggtgcggcacttgtcgccgacccataaagaagggaatcttattctatatatcattagcaattgtccacaaacatgtcgacggacaaggaggtcacccctgccacaggccccgagatctcgcacaacacagcagattcggcacctgaagtcatcgtcgatgcagagaaagggcgcgccggttccgtacctcatgtcgatattaatcaaaatctgaatgctaagattcgaaatccgttggcgggaatcccgcgtgagcaattgctcgaagaagtgacagcatttgccaacaagcatggtttagaagagcacatgacaacattgcggaagggcgcactcgttgctcaggatcccagctgctttgaagacttacagggagaggtggcactcaccgaagacgagatttatgccctcaaacgcgagattacacacaaatggcgagttccgagaatgctgtatctcactatcatcacttgcagtatcggagccgccgttcaaggctgggaccaagagggcagtaatggtgcaaacctcacgttccctgtgcagttcggcattggagggagaacagatcacgatgttttcctcgtagggctcatcaactcagcaccatatataggctcggccttgataggatgttggtgctctgacccactgaacaatatctttggacgacgaggcaccatcttcatctctgctatattctgtctgcttacaccaattggcggggctgtgacccagaattgggaacagcttctagtaacgcgtttactgttaggcgttggcatgggtatcaaagcatcgactgtacctattttcgcagcagaaaacagtcctgcagccattcgtggggcactggtcatgacctggcaattatggactgctttcggtatttggcttgggacaattgctaatctagtcgttggcaaagttggtccgatagcctggcgattgcagattggttcagcattcataccagcgattccactcgtggctcttatcctgttttgtccggaaagtcctcgatggtacatcaagaaaggtcgatacgccgatgccatgagatcgctcctagtcttgcgaaatgaccctatccaggcagctcgtgatctctatgcaatccaagcacaggtccaagttgaagctgaagctattggtgattcctcgtatatcaaacgatttttcgaattgtggacaattccacgcattcgacgagcaacaggcgctgcatttgtcgtcatgattgcgcagcaactgtgcggaatcaatatcattgctttctattcttcgacggttttcagagaggcgggagcgagtgactacacagctcttcttgcatcgttcggcttcggagccatcaattttgggttcgcttggccggctatctggacaatcgacaccttcggacgccgctctttgctgcttttcaccttcccaaacatggcctggtcccttctcgccgccgggctattcaaccttctcaatggaaatagcgcggcacacgttgctgttgttgctgtattcatctacatcttcgctgcattttactctcccggcgaaggccctgtccctttcgcctacagtgccgaggtcttcccgctctcgcatcgtgaggttggcatggcttttgctgtcgcgacaaatctcttctgggctgccgtattgtcgatcacgtttccgaagattcttgattcgcttggtgttgttggcgcattcggtctctacgctggtttcaatgttgtggggtttgtcttgatcttcctgtgggttcccgagaccaaacagcgtacactcgaagagctggattacgtcttcgccgttcctagcagagtgtttatcaaatatagcttcaccaaggcggtaccttggtggtttcagcgctatatcctatgcaataagcgagcaaccctcgagccgctgtaccagtttgatagtccacctcccgttgcccctgtggaaaagcgagactcctctgtcgataaaaaagagaaagagggtgaacctactgctacaacaacaggtgccgaaattcagacagcaaacagctgaaacagattcctcgacgtttccagtgatagattgtcggaagtatgtttcgaccaacctcgactgcataattgatttagctagtggttatttctgacatgaggctcgaatttcttgggtaattggaatgatcgcaccacagcatgggccgtattccaatggccattggtcacaaacgctgcgtgaacagtccttattccgtccacactggacttctattaggcagtggacaagtcgttctttcggttgactgaatactagtatttgtcttttccattgtatacccacttccgtagcattccaattgaataccttagccaaactacatgcatcgcgatgtgtagatatccatccaggccactgtcaaacctagagacattaacatgtaccaatatctaatcataccggc

SEQ ID NO: 39904 - DNA, 3006 bp, Muscodor strobelii
  misc_feature: SGI cDNA ID NO. 573898
  misc_feature: Reduced expression when VOC is produced
  misc_feature: Encodes the peptide sequence at SEQ ID NO 39905
atgtcgtcgacgtctgcgctgatatcgcataccggcgacaataacccagaaccgtcgtctacacccgctacaacggacgatgtcgtaactgaaaagcctctatcaatatcgtcgtcggccgaccttggcaccaacattccagcacccgccgctactgccgcatctgccacccagatcccagcgaactcggccaccaaagaccgcaccaagctcggtcgcaaggatggcgatgcgaatccgagggacaacccgagggacagtccgagagactcgagagactaccgtcccaatgcgccgccgcttgtgtccccatcatcccagcccactacctccagtgctgctgtagatccgatatcacatcacgtctttgcccggactgccacagaccgctccattgcttcgagactcctgaactcggcacgacccgacagtcctgccaatgaccctctacctcgccccagcgccgatctctccaacaagctgtctacctctgtgccggactcgggcaaggataagaagaagggagtatctttcctcagtcgcttaagcatgatcggtggcaagaaaaaggacacggacagtacagcagacgaggaatctgaatttagtgaacagaggactgaaggtgctaatgccgtcgccttctcttctgccgtctatatcccccaccacaaggagccaccccgctatatccgagttcgatcccaccacaagaagaccaaagagtttaatcacgttttcctggcacaggagctcaatgcgactcgtccaccggccaccaatggacatgcaaacaattccgtttccgaggagacggcatctcaggatcctgctaacgaccacgccatatgggctgtcgaattcagtcaagatggtcgatatttagctacgggcggccgcgatcatgtcgtacgggtattcgccgtcattgcgaccgaagaggaccgtaagtcgtccgaggatgacgagcaagcaccccctggccgagaagagcgtctcagcgcccctgtcttccattctaagccgattcgcgaattcgtcgggcattcaggagacattctagatctgagctggagcaaaaatgggtttctgctctcttcttcgatggataagacggttcgactttggcacactagtagacaagagtgtttatgtacatttgaacacaaggactttgtcgcctcaattgccttccacccacgtgacgaccgttttttcctggctggatcactcgactccgtcctgcgactctggagcattcccgacaaggccatagcatatacgagtcaaatgtcggatataatcacggctgtgggattctcaccagatggcacgactgcaatcgctggctgtttcaacgggatatgcatgttttataggacagagggcctaaaatacctgactcaaatccacgtgcgatcttcccgaggaaagaatgcgaaagggagcaagatcacaggtatccagacgatgctttacccgccaggcaagcaggatggcgaagtcaaggtgcttattacttcgaacgactcccggatacgcatttacaacctcggagacaaggctctcgaaatcaaactgaaaggccatgagaatactagtagtcagatcagggcgactttcagtgatgatgggtcttatgttatatgtggtagtgaagacagaagagcatttatatggtctaaagagatggcagagtccgaaacgagagacaaaggtccttgtgagtacttcgaagcccatgcagatattgtcacaacggcagtctttgcgcccacggcgacacgtcagcttctgcaagcttccggcgatcccatcttctcactttgtaatccgccacctgtcacgctgcgaagcctagacgaatcgacgacaaatctagcctcttcgacgttcgacacccaatcgctaaattcactgaaaagtcgaaagcctgaggaatcaccggcttttatcgcccggtcttctcactatgacggccaaatcatagtaactacagaccgcgcggggttgatcaaggtgtttcgacaagactgtgctttcacaaagcgacggcatgagaattgggaaacgggctcactatcaaggagactgggccgcgatagcctgcttggtaggacaggtagcatcatgacgcggactagtgcagctagtagccgagatccgcactcacgtcgaggttctctcactcaacctgttcagatcaactcggatcgaataaatacctggcgacaaggcgttgagggcaatgcgggtaggccactttcgatctcaacatccatagctccagcacgcagcgaacgctcaatgtcccccacgaaaaccaaccgccagccatcatccagtctcgcgaacgcggcttccgaagcgaggaaacaacagtactcaggagcctcgccgagagtccagcccacgagtccggcgggtagtgtccgatccggacggacgaacgaacatgggaattctgtccccccgacgccgggtttttccttccagagtctggacgatgacgccaatcatttaaggcttgatgcagcgggagctagttactccttctggaacttaaacaaatggcggaattggaacggccagggaggcgacggggcgggctcgagacatgaacggtctggtagctcgacattagaccctgaatcggctgcctccaacaataacaaaaataatagaagaaggagttttggatttggtccaactgatagcaatacgaacgacaaggataggagaaagtcgatgccactcagacctgcgcccgtggaggaaagagatgagagcgagggatcgtatcttgctccgccggagagaagtgttacccacaggacggcgagtctggttagtgcgcttagctccgagctgggcacgcatgatactgagggcgatgatgaggagacgaggtgtagtaagtgtgggagtagggattttagagcgaagaaaatcgttggtgttcagaggttgctttgtaagaattgtgggactatgatgagggagtag

SEQ ID NO: 39905 - protein, 1001 aa, Muscodor strobelii
  misc_feature: SGI Peptide ID NO. 573898
  misc_feature (340)..(377): Pfam Id: PF00400 Pfam Desc: WD domain, G-beta repeat
  misc_feature (270)..(308): Pfam Id: PF00400 Pfam Desc: WD domain, G-beta repeat
  misc_feature (381)..(419): Pfam Id: PF00400 Pfam Desc: WD domain, G-beta repeat
  misc_feature (521)..(561): Pfam Id: PF00400 Pfam Desc: WD domain, G-beta repeat
  misc_feature (111)..(998): NCBI GI: 154303942 Blast Desc: BC1G_08855 [Botryotinia fuckeliana B05.10] gi|150854439|gb|EDN29631.1| BC1G_08855 [Botryotinia fuckeliana B05.10]
  misc_feature (112)..(859): NCBI GI: 171680972 Blast Desc: protein product [Podospora anserina] gi|170940444|emb|CAP65671.1| protein product [Podospora anserina]
  misc_feature (89)..(859): NCBI GI: 46111639 Blast Desc: FG02701.1 [Gibberella zeae PH-1]
  misc_feature (110)..(859): NCBI GI: 116191477 Blast Desc: CHGG_05456 [Chaetomium globosum CBS 148.51] gi|88181369|gb|EAQ88837.1| CHGG_05456 [Chaetomium globosum CBS 148.51]
  misc_feature (111)..(860): NCBI GI: 156040862 Blast Desc: SS1G_11409 [Sclerotinia sclerotiorum 1980] gi|154695793|gb|EDN95531.1| SS1G_11409 [Sclerotinia sclerotiorum 1980]
  misc_feature (110)..(831): NCBI GI: 256726099 Blast Desc: NECHADRAFT_100890 [Nectria haematococca mpVI 77-13-4]
  misc_feature (106)..(790): NCBI GI: 164423092 Blast Desc: NCU09162 [Neurospora crassa OR74A] gi|157069943|gb|EAA29836.2| conserved [Neurospora crassa OR74A]
  misc_feature (100)..(846): NCBI GI: 238842635 Blast Desc: WD repeat protein [Microsporum canis CBS 113480]
  misc_feature (108)..(782): NCBI GI: 258567058 Blast Desc: conserved [Uncinocarpus reesii 1704] gi|237905719|gb|EEP80120.1| conserved [Uncinocarpus reesii 1704]
  misc_feature (108)..(796): NCBI GI: 145601663 Blast Desc: MGG_10955 [Magnaporthe grisea 70-15] gi|145010191|gb|EDJ94847.1| MGG_10955 [Magnaporthe grisea 70-15]
  misc_feature: Useful for introducing or modulating the production of volatile compounds
MSSTSALISHTGDNNPEPSSTPATTDDVVTEKPLSISSSADLGTNIPAPAATAASATQIPANSATKDRTKLGRKDGDANPRDNPRDSPRDSRDYRPNAPPLVSPSSQPTTSSAAVDPISHHVFARTATDRSIASRLLNSARPDSPANDPLPRPSADLSNKLSTSVPDSGKDKKKGVSFLSRLSMIGGKKKDTDSTADEESEFSEQRTEGANAVAFSSAVYIPHHKEPPRYIRVRSHHKKTKEFNHVFLAQELNATRPPATNGHANNSVSEETASQDPANDHAIWAVEFSQDGRYLATGGRDHVVRVFAVIATEEDRKSSEDDEQAPPGREERLSAPVFHSKPIREFVGHSGDILDLSWSKNGFLLSSSMDKTVRLWHTSRQECLCTFEHKDFVASIAFHPRDDRFFLAGSLDSVLRLWSIPDKAIAYTSQMSDIITAVGFSPDGTTAIAGCFNGICMFYRTEGLKYLTQIHVRSSRGKNAKGSKITGIQTMLYPPGKQDGEVKVLITSNDSRIRIYNLGDKALEIKLKGHENTSSQIRATFSDDGSYVICGSEDRRAFIWSKEMAESETRDKGPCEYFEAHADIVTTAVFAPTATRQLLQASGDPIFSLCNPPPVTLRSLDESTTNLASSTFDTQSLNSLKSRKPEESPAFIARSSHYDGQIIVTTDRAGLIKVFRQDCAFTKRRHENWETGSLSRRLGRDSLLGRTGSIMTRTSAASSRDPHSRRGSLTQPVQINSDRINTWRQGVEGNAGRPLSISTSIAPARSERSMSPTKTNRQPSSSLANAASEARKQQYSGASPRVQPTSPAGSVRSGRTNEHGNSVPPTPGFSFQSLDDDANHLRLDAAGASYSFWNLNKWRNWNGQGGDGAGSRHERSGSSTLDPESAASNNNKNNRRRSFGFGPTDSNTNDKDRRKSMPLRPAPVEERDESEGSYLAPPERSVTHRTASLVSALSSELGTHDTEGDDEETRCSKCGSRDFRAKKIVGVQRLLCKNCGTMMRE

SEQ ID NO: 39906 - DNA, 5654 bp, Muscodor strobelii
  misc_feature: SGI EST ID NO. CUFF.96648.1
  misc_feature: Variant of the nucleotide sequence at SEQ ID NO 39904
cggaccaacagttcggacaggcctctctcattagcgggctagcgtcaccttttttggagataggtcgctagaaaacgatagctttccgcagtgagccgaggagcttcacgggcatacagcgaatccatatattttacctcgattgctgttttaatattgaccatgcccagtttaccatgcgcactcggtcataggttccgattataggaaataacgcacaaaggctccatagcttcaagagtgtccgcctttggcgcatactctcttttaagttgcccggtggtctgacaacactgtactggagcgcagcgaagttagagataatggaccatgtcgtcgacgtctgcgctgatatcgcataccggcgacaataacccagaaccgtcgtctacacccgctacaacggacgatgtcgtaactgaaaagcctctatcaatatcgtcgtcggccgaccttggcaccaacattccagcacccgccgctactgccgcatctgccacccagatcccagcgaactcggccaccaaagaccgcaccaagctcggtcgcaaggatggcgatgcgaatccgagggacaacccgagggacagtccgagagactcgagagactaccgtcccaatgcgccgccgcttgtgtccccatcatcccagcccactacctccagtgctgctgtagatccgatatcacatgtacatacctccctctatgtcccgccatatgcttgacctgccattgacgcatcatgtttgctccatctccagcacgtctttgcccggactgccacagaccgctccattgcttcgagactcctgaactcggcacgacccgacagtcctgccaatgaccctctacctcgccccagcgccgatctctccaacaagctgtctacctctgtgccggactcgggcaaggataagaagaagggagtatctttcctcagtcgcttaagcatgatcggtggcaagaaaaaggacacggacagtacagcagacgaggaatctgaatttagtgaacagaggactgaaggtgctaatgccgtcgccttctcttctgccgtctatatcccccaccacaaggagccaccccgctatatccgagttcgatcccaccacaagaagaccaaagagtttaatcacgttttcctggcacaggagctcaatgcgactcgtccaccggccaccaatggacatgcaaacaattccgtttccgaggagacggcatctcaggatcctgctaacgaccacgccatatgggctgtcgaattcagtcaagatggtcgatatttagctacgggcggccgcgatcatgtcgtacgggtattcgccgtcattgcgaccgaagaggaccgtaagtcgtccgaggatgacgagcaagcaccccctggccgagaagagcgtctcagcgcccctgtcttccattctaagccgattcgcgaattcgtcgggcattcaggagacattctagatctgagctggagcaaaaatgggtttctgctctcttcttcgatggataagacggttcgactttggcacactagtagacaagagtgtttatgtacatttgaacacaaggactttgtcgcctcaattgccttccacccacgtgacgaccgttttttcctggctggatcactcgactccgtcctgcgactctggagcattcccgacaaggccatagcatatacgagtcaaatgtcggatataatcacggctgtgggattctcaccagatggcacgactgcaatcgctggctgtttcaacgggatatgcatgttttataggacagagggcctaaaatacctgactcaaatccacgtgcgatcttcccgaggaaagaatgcgaaagggagcaagatcacaggtatccagacgatgctttacccgccaggcaagcaggatggcgaagtcaaggtgcttattacttcgaacgactcccggatacgcatttacaacctcggagacaaggctctcgaaatcaaactgaaaggccatgagaatactagtagtcagatcagggcgactttcagtgatgatgggtcttatgttatatgtggtagtgaagacagaagagcatttatatggtctaaagagatggcagagtccgaaacgagagacaaaggtccttgtgagtacttcgaagcccatgcagatattgtcacaacggcagtctttgcgcccacggcgacacgtcagcttctgcaagcttccggcgatcccatcttctcactttgtaatccgccacctgtcacgctgcgaagcctagacgaatcgacgacaaatctagcctcttcgacgttcgacacccaatcgctaaattcactgaaaagtcgaaagcctgaggaatcaccggcttttatcgcccggtcttctcactatgacggccaaatcatagtaactacagaccgcgcggggttgatcaaggtgtttcgacaagactgtgctttcacaaagcgacggcatgagaattgggaaacgggctcactatcaaggagactgggccgcgatagcctgcttggtaggacaggtagcatcatgacgcggactagtgcagctagtagccgagatccgcactcacgtcgaggttctctcactcaacctgttcagatcaactcggatcgaataaatacctggcgacaaggcgttgagggcaatgcgggtaggccactttcgatctcaacatccatagctccagcacgcagcgaacgctcaatgtcccccacgaaaaccaaccgccagccatcatccagtctcgcgaacgcggcttccgaagcgaggaaacaacagtactcaggagcctcgccgagagtccagcccacgagtccggcgggtagtgtccgatccggacggacgaacgaacatgggaattctgtccccccgacgccgggtttttccttccagagtctggacgatgacgccaatcatttaaggcttgatgcagcgggagctagttactccttctggaacttaaacaaatggcggaattggaacggccagggaggcgacggggcgggctcgagacatgaacggtctggtagctcgacattagaccctgaatcggctgcctccaacaataacaaaaataatagaagaaggagttttggatttggtccaactgatagcaatacgaacgacaaggataggagaaagtcgatgccactcagacctgcgcccgtggaggaaagagatgagagcgagggatcgtatcttgctccgccggagagaagtgttacccacaggacggcgagtctggttagtgcgcttagctccgagctgggcacgcatgatactgagggcgatgatgaggagacgaggtgtagtaagtgtgggagtagggattttagagcgaagaaaatcgttggtgttcagaggttgctttgtaagaattgtgggactatgatgagggagtagtgagactttgttggaaaggaaatcacgccggggatgaagaagctatgggactttgaaaagctgagatgataactgggatgttgagatgagttgccgcgctgcatcataggatatggagttggattcctcgggttaaaagataccacctcgcttgtttatgggttctgtatattgcatagcatggcatggtatggcatggcaatggtttaaaacatggtataggaattcaagtggatgagtgagtgtttgtgaaattacttgtaggtgaagagcttgtttgatcattacgtatgtcgcattatgtgcgctagaatttgtgagacgtatcttctctcatcactcgcttatattcttctcctcagagatggcgcattagtcatatctctaccactgcatattgaacatgaatccgtagctcatatgccatcctcgctccagaatttcgacatccaacatatccattccatcagaacgggccagcacttggtccgattctcgactccgtcctgtatgctctcctttcagccttcggcttgacgttggtatctcgatcacatcactgctgaagggaacagattctgcgcttcgccagccccgtcgcttgtcaagcactcacgtatgtaaccgcgaagtaacttactgcttcccgtgaataccataaacaacaggaatcggcctaaaaatactgaactcctgacccgtcgcaacgagcgtgcccggaatctggggatgccaatggacctccttagcatgttcggagatatgttcaaagagtaactgcggcggcatatccttgacgcccgccgtatctttactctcctcatcatccaactcaaccgacaaatcccacagcgtgactttatggtctccggccgcgatcgctaccatgctgtcgtccgtgggatgccactcgacgctcgtaatttggtctttgtggtatgcgaaactggcgattgggcttggtttttcggcagccccgcctttccattgtcgcaggtcccatacgcgccatacgccgtcgtctgcgcccgtggcgaggaggtgcgtggttagtcgtgaccaggagagtacgtttacgtctgtgctagagacttgcacggtgatggcgggcttgcggctcttggagcgcacgtcccagacgcggacggtgccgtcggaggaggcggatgcgaagacggatgcctcttgaggtgaccattggatgtcttcgacgcttgaggtgtggccttggaatggtcgcgtgtctgttacccagccgccgccgtctgttcgcgttgttacgtatattaggccgtcgttatcgccagtcaggagcttgccgccagggactagaggggaccagtcgagggcgtagccttcggatttgtgggcgcggatcgtggagatgggtttattctgctgcggtgtgatgatagtgcccgggttgtcgaaggaggcgaggtgtggtgttacgtcgtggatgaagatctgtgttgactcggtcatggttgcggtgatcgtggtgggcggtttggaggggtcggaagacgggatctggtgggcacgaatacggttcgtggtcgaggttaagggaatggacttgtgctctagaataggatcggtctcttcgtcatcatcgccgtctgaatccgagtctgagtcgtcttccctctgctgtcgactcagaccactaaacttcataaccatgagctggttctccttctcgcgactgctctcggcttgggttccggcaacagtgtacatggtcgccgggtagactttctctcgcttatcgccgagtccgtcttttattatgtcgaacgatagacatggccacggtgtgctgaggttgtgcagcatctcgtatgtgcccagatcaggggcgagatgctggccctgctcgagcttgttgcgaccgacgatgaaggtgccgttgtcgacatccatagccccggctgcacgctcctcggcctccctctctgcatcaggtcggccatcaacaccggcttcgaggatctcgtcttcgctttcgaactcgtcttcgaattcatcttcgaattctcccatttccttgtccatatctacgtccatgggttcggggcgcccacctcccttcagaggcgtgtcgccctcgccgggttccgctgttcgtttcgacattgtgacgatagtactgcgctatgtcggaaacgctatcgcaagaatctaaacggggagtgacggatgtcacgaagctgtggcgggcgcaaaaaagtcgaagactaaaa

SEQ ID NO: 39907 - DNA, 1503 bp, Muscodor strobelii
  misc_feature: SGI cDNA ID NO. 573899
  misc_feature: Encodes the peptide sequence at SEQ ID NO 39908
atgtcgaaacgaacagcggaacccggcgagggcgacacgcctctgaagggaggtgggcgccccgaacccatggacgtagatatggacaaggaaatgggagaattcgaagatgaattcgaagacgagttcgaaagcgaagacgagatcctcgaagccggtgttgatggccgacctgatgcagagagggaggccgaggagcgtgcagccggggctatggatgtcgacaacggcaccttcatcgtcggtcgcaacaagctcgagcagggccagcatctcgcccctgatctgggcacatacgagatgctgcacaacctcagcacaccgtggccatgtctatcgttcgacataataaaagacggactcggcgataagcgagagaaagtctacccggcgaccatgtacactgttgccggaacccaagccgagagcagtcgcgagaaggagaaccagctcatggttatgaagtttagtggtctgagtcgacagcagagggaagacgactcagactcggattcagacggcgatgatgacgaagagaccgatcctattctagagcacaagtccattcccttaacctcgaccacgaaccgtattcgtgcccaccagatcccgtcttccgacccctccaaaccgcccaccacgatcaccgcaaccatgaccgagtcaacacagatcttcatccacgacgtaacaccacacctcgcctccttcgacaacccgggcactatcatcacaccgcagcagaataaacccatctccacgatccgcgcccacaaatccgaaggctacgccctcgactggtcccctctagtccctggcggcaagctcctgactggcgataacgacggcctaatatacgtaacaacgcgaacagacggcggcggctgggtaacagacacgcgaccattccaaggccacacctcaagcgtcgaagacatccaatggtcacctcaagaggcatccgtcttcgcatccgcctcctccgacggcaccgtccgcgtctgggacgtgcgctccaagagccgcaagcccgccatcaccgtgcaagtctctagcacagacgtaaacgtactctcctggtcacgactaaccacgcacctcctcgccacgggcgcagacgacggcgtatggcgcgtatgggacctgcgacaatggaaaggcggggctgccgaaaaaccaagcccaatcgccagtttcgcataccacaaagaccaaattacgagcgtcgagtggcatcccacggacgacagcatggtagcgatcgcggccggagaccataaagtcacgctgtgggatttgtcggttgagttggatgatgaggagagtaaagatacggcgggcgtcaaggatatgccgccgcagttactctttgaacatatctccgaacatgctaaggaggtccattggcatccccagattccgggcacgctcgttgcgacgggtcaggagttcagtatttttaggccgattcctgttgtttatggtattcacgggaagcagtaa

SEQ ID NO: 39908 - protein, 500 aa, Muscodor strobelii
  misc_feature: SGI Peptide ID NO. 573899
  misc_feature (297)..(336): Pfam Id: PF00400 Pfam Desc: WD domain, G-beta repeat
  misc_feature (393)..(432): Pfam Id: PF00400 Pfam Desc: WD domain, G-beta repeat
  misc_feature (342)..(381): Pfam Id: PF00400 Pfam Desc: WD domain, G-beta repeat
  misc_feature (1)..(492): NCBI GI: 261359257 Blast Desc: ribosome assembly protein RRB1 [Verticillium albo-atrum VaMs.102]
  misc_feature (1)..(492): NCBI GI: 46111637 Blast Desc: FG02700.1 [Gibberella zeae PH-1]
  misc_feature (1)..(492): NCBI GI: 85090645 Blast Desc: NCU09521 [Neurospora crassa OR74A] gi|28919885|gb|EAA29280.1| NCU09521 [Neurospora crassa OR74A]
  misc_feature (1)..(492): NCBI GI: 116191427 Blast Desc: CHGG_05431 [Chaetomium globosum CBS 148.51] gi|88181344|gb|EAQ88812.1| CHGG_05431 [Chaetomium globosum CBS 148.51]
  misc_feature (1)..(492): NCBI GI: 171680998 Blast Desc: protein product [Podospora anserina] gi|170940457|emb|CAP65684.1| protein product [Podospora anserina]
  misc_feature (12)..(492): NCBI GI: 156059098 Blast Desc: SS1G_03561 [Sclerotinia sclerotiorum 1980] gi|154701348|gb|EDO01087.1| SS1G_03561 [Sclerotinia sclerotiorum 1980]
  misc_feature (12)..(492): NCBI GI: 154304274 Blast Desc: BC1G_08407 [Botryotinia fuckeliana B05.10] gi|150854209|gb|EDN29401.1| BC1G_08407 [Botryotinia fuckeliana B05.10]
  misc_feature (1)..(492): NCBI GI: 115399056 Blast Desc: conserved [Aspergillus terreus NIH2624] gi|114192000|gb|EAU33700.1| conserved [Aspergillus terreus NIH2624]
  misc_feature (1)..(492): NCBI GI: 259483461 Blast Desc: TPA: ribosome biogenesis protein (Rrb1), (AFU_orthologue; AFUA_6G10320) [Aspergillus nidulans FGSC A4]
  misc_feature (12)..(492): NCBI GI: 145601667 Blast Desc: MGG_14350 [Magnaporthe grisea 70-15] gi|145010193|gb|EDJ94849.1| MGG_14350 [Magnaporthe grisea 70-15]
  misc_feature (215)..(493): SWISSPROT Homolog: EC 2.3.1.48 Histone acetyltransferase
MSKRTAEPGEGDTPLKGGGRPEPMDVDMDKEMGEFEDEFEDEFESEDEILEAGVDGRPDAEREAEERAAGAMDVDNGTFIVGRNKLEQGQHLAPDLGTYEMLHNLSTPWPCLSFDIIKDGLGDKREKVYPATMYTVAGTQAESSREKENQLMVMKFSGLSRQQREDDSDSDSDGDDDEETDPILEHKSIPLTSTTNRIRAHQIPSSDPSKPPTTITATMTESTQIFIHDVTPHLASFDNPGTIITPQQNKPISTIRAHKSEGYALDWSPLVPGGKLLTGDNDGLIYVTTRTDGGGWVTDTRPFQGHTSSVEDIQWSPQEASVFASASSDGTVRVWDVRSKSRKPAITVQVSSTDVNVLSWSRLTTHLLATGADDGVWRVWDLRQWKGGAAEKPSPIASFAYHKDQITSVEWHPTDDSMVAIAAGDHKVTLWDLSVELDDEESKDTAGVKDMPPQLLFEHISEHAKEVHWHPQIPGTLVATGQEFSIFRPIPVVYGIHGKQ

SEQ ID NO: 39909 - DNA, 1827 bp, Muscodor strobelii
  misc_feature: SGI cDNA ID NO. 573900
  misc_feature: Encodes the peptide sequence at SEQ ID NO 39910
atgagtaacaacacacctcacgaaggtcccggtgagatagaccccaaatcagatccgcaatatttgcagttcagatgtctgcctcccggtcagcaattaaacagatggtctcatatgattaccagagaacatgactacccaggagctcaggctatgctctacggcgccggagtaccaaatgaggatatgatgaagaatgcgcctcatgttggcgttgctacgatatggtgggaaggaaatccttgcaacacacatctcctcgaattcggaaagatcgtgaaaaaggggctggagaaacagaatatgctcgcatggcaatataatgcagtgggagtatcagacgccattacaatgggtggcgaaggaatgagatattctctgcaatctcgtgatctcatcgccgacagtatcgagacggtgactctagctcaacatcacgatgccaatatcgctattcctggatgcgacaagaacatgcctggtgtcattatggccgctgcgagacacaatcgtccttttatcatgatctacggaggaacaatccgaaaaggctactctagcctcttggaaaagaacatcaacgtcggcagctgctacgaagccgcaggcgcatttacatatggcacactgcacgccaagacgaacccaggcaccgaaggtcgtactccaagtgatgtaatgtctgatctcgagagacacgcctgtccgggcgcgggtgcctgcggtggcatgtatacggcgaatacgatggcgactgcgatcgaggcaatgggcttatcactaccgggctcatcttcgtatccggcattgtctcctgagaaagcccgtgaatgcgaaagggccgcggaagtcattaagattacgatggagaaagatattcgccctagagatctgctcacgagagagtcttttgagaacgcgcttgttatcactatgatcctaggcggctcgactaatggagttttacatttcctggctatggccaactcggcagaagttcccttgacgttagaggatgtaactcgagtcagcaacaagacacctttccttgcggatttggctcctagtggacgatacttgatggaggatctatacaaaatcggcggaacaccctcagtccttaagcgtctcatagccgaaggactcataaacggcaacatccccacagtcacaggtaaaacactggccgagaatgtcgcagactggccagacctaccagcagaccaagatatcatccggccgctctccaaccccatcaaatctagcggccatattcgcgtcttgcgtggaaacttcgcgcccgagggggcagtggccaagatcactggaaaagaagggttaagcttcacgggtaaagcgcgagtatttaataaggaacatgagctcgatactgcgttgacgaaaggcgagatccctagagatgagaatctggtcttaattgttagatatgaggggcctaaaggtggaccgggaatgcctgaacaattgagagcttcggcggcaatcatgggcgcaggtctgaagaacatcgcgctcgtcaccgatggtcgatacagcggtgccagtcacggattcatcgtcggtcatgtaaccccagaagccgcagtcggcggcccaattgcgctggtcaaagacggagacacgatcgttatcgacgctacgagtgatcgcatcgatatcaccaacgtagaagacgcagagctggagaataggagaaaagaatggaaggcaccgactccaagagtgaaaagaggcgctctagcgaagtatgcgaggcttgtgggagatgccagtcacggtgctgtgacggatcaatggagcgattga

SEQ ID NO: 39910 - protein, 608 aa, Muscodor strobelii
  misc_feature: SGI Peptide ID NO. 573900
  misc_feature (67)..(604): Pfam Id: PF00920 Pfam Desc: Dehydratase family
  misc_feature (14)..(606): NCBI GI: 46111671 Blast Desc: FG02717.1 [Gibberella zeae PH-1]
  misc_feature (4)..(608): NCBI GI: 85109701 Blast Desc: dihydroxy-acid dehydratase [Neurospora crassa OR74A] gi|28924695|gb|EAA33809.1| dihydroxy-acid dehydratase [Neurospora crassa OR74A]
  misc_feature (14)..(605): NCBI GI: 261359268 Blast Desc: dihydroxy-acid dehydratase [Verticillium albo-atrum VaMs.102]
  misc_feature (14)..(606): NCBI GI: 239609593 Blast Desc: dihydroxyacid dehydratase Ilv3 [Ajellomyces dermatitidis ER-3]
  misc_feature (14)..(606): NCBI GI: 261196732 Blast Desc: dihydroxyacid dehydratase Ilv3 [Ajellomyces dermatitidis SLH14081] gi|239596014|gb|EEQ78595.1| dihydroxyacid dehydratase Ilv3 [Ajellomyces dermatitidis SLH14081]
  misc_feature (19)..(606): NCBI GI: 156048282 Blast Desc: SS1G_08872 [Sclerotinia sclerotiorum 1980] gi|154693269|gb|EDN93007.1| SS1G_08872 [Sclerotinia sclerotiorum 1980]
  misc_feature (15)..(606): NCBI GI: 119189087 Blast Desc: CIMG_04591 [Coccidioides immitis RS]
  misc_feature (15)..(606): NCBI GI: 240111371 Blast Desc: Dihydroxy-acid dehydratase, [Coccidioides posadasii C735 delta SOWgp]
  misc_feature (15)..(606): NCBI GI: 258576203 Blast Desc: dihydroxy-acid dehydratase [Uncinocarpus reesii 1704] gi|237902549|gb|EEP76950.1| dihydroxy-acid dehydratase [Uncinocarpus reesii 1704]
  misc_feature (18)..(606): NCBI GI: 169764815 Blast Desc: [Aspergillus oryzae RIB40] gi|83764733|dbj|BAE54877.1| protein product [Aspergillus oryzae]
  misc_feature (31)..(604): SWISSPROT Homolog: EC 4.2.1.9 Dihydroxy-acid dehydratase
MSNNTPHEGPGEIDPKSDPQYLQFRCLPPGQQLNRWSHMITREHDYPGAQAMLYGAGVPNEDMMKNAPHVGVATIWWEGNPCNTHLLEFGKIVKKGLEKQNMLAWQYNAVGVSDAITMGGEGMRYSLQSRDLIADSIETVTLAQHHDANIAIPGCDKNMPGVIMAAARHNRPFIMIYGGTIRKGYSSLLEKNINVGSCYEAAGAFTYGTLHAKTNPGTEGRTPSDVMSDLERHACPGAGACGGMYTANTMATAIEAMGLSLPGSSSYPALSPEKARECERAAEVIKITMEKDIRPRDLLTRESFENALVITMILGGSTNGVLHFLAMANSAEVPLTLEDVTRVSNKTPFLADLAPSGRYLMEDLYKIGGTPSVLKRLIAEGLINGNIPTVTGKTLAENVADWPDLPADQDIIRPLSNPIKSSGHIRVLRGNFAPEGAVAKITGKEGLSFTGKARVFNKEHELDTALTKGEIPRDENLVLIVRYEGPKGGPGMPEQLRASAAIMGAGLKNIALVTDGRYSGASHGFIVGHVTPEAAVGGPIALVKDGDTIVIDATSDRIDITNVEDAELENRRKEWKAPTPRVKRGALAKYARLVGDASHGAVTDQWSD

SEQ ID NO: 39911 - DNA, 2081 bp, Muscodor strobelii
  misc_feature: SGI EST ID NO. CUFF.96388.0
  misc_feature: Variant of the nucleotide sequence at SEQ ID NO 39909
tcggaaagatcgtgaaaaaggggctggagaaacagaatatgctcgcatggcaatataatgcagtgggagtatcagacgccattacaatgggtggcgaaggaatgagatattctctgcaatctcgtgatctcatcgccgacagtatcgagacggtgactctagctcaacatcacgatgccaatatcgctattcctggatgcgacaagaacatgcctggtgtcattatggccgctgcgagacacaatcgtccttttatcatgatctacggaggaacaatccgaaaaggctactctagcctcttggaaaagaacatcaacgtcggcagctgctacgaagccgcaggcgcatttacatatggcacactgcacgccaagacgaacccaggcaccgaaggtcgtactccaagtgatgtaatgtctgatctcgagagacacgcctgtccgggcgcgggtgcctgcggtggcatgtatacggcgaatacgatggcgactgcgatcgaggcaatgggcttatcactaccgggctcatcttcgtatccggcattgtctcctgagaaagcccgtgaatgcgaaagggccgcggaagtcattaagattacgatggagaaagatattcgccctagagatctgctcacgagagagtcttttgagaacgcgcttgttatcactatgatcctaggcggctcgactaatggagttttacatttcctggctatggccaactcggcagaagttcccttgacgttagaggatgtaactcgagtcagcaacaagacacctttccttgcggatttggctcctagtggacgatacttgatggaggatctatacaaaatcggcggaacaccctcagtccttaagcgtctcatagccgaaggactcataaacggcaacatccccacagtcacaggtaaaacactggccgagaatgtcgcagactggccagacctaccagcagaccaagatatcatccggccgctctccaaccccatcaaatctagcggccatattcgcgtcttgcgtggaaacttcgcgcccgagggggcagtggccaagatcactggaaaagaagggttaagcttcacgggtaaagcgcgagtatttaataaggaacatgagctcgatactgcgttgacgaaaggcgagatccctagagatgagaatctggtcttaattgttagatatgaggggcctaaaggtggaccgggaatgcctgaacaattgagagcttcggcggcaatcatgggcgcaggtctgaagaacatcgcgctcgtcaccgatggtcgatacagcggtgccagtcacggattcatcgtcggtcatgtaaccccagaagccgcagtcggcggcccaattgcgctggtcaaagacggagacacgatcgttatcgacgctacgagtgatcgcatcgatatcaccaacgtagaagacgcagagctggagaataggagaaaagaatggaaggcaccgactccaagagtgaaaagaggcgctctagcgaagtatgcgaggcttgtgggagatgccagtcacggtgctgtgacggatcaatggagcgattgagtatgctgctttgccagcgaggtcataggagcttctgagctagcaatcaactacctattggttgaggagtgaggaatttccttatacttccgtacgatcgggcaggtgcgagtgagaaacgcgattgacaatgaatgatgggttgtcctatgctcctgtacgatcaggtagatgcaaagttttgcaggcatttcaacgatttctgctccggtcgaaacacaaaatgccatgcttttttgcctgcacaatacaaaattcccagactgcagaaaaccaatacaccacccatcccaccctacaccatcaaccatcacattactaccacacaatccacatgctcatccacaatgtcactctcggctctttcggacgacgagagagacatcatcaattccatctacagggcgcaagtggaagcttttagaagtgctgtagacgcagatgtagagggagtaaggagaataagctggaaagtaaccccggcacacaacttatggtaggtacgcgcctaaacctctg

SEQ ID NO: 39912 - DNA, 1179 bp, Muscodor strobelii
  misc_feature: SGI cDNA ID NO. 573901
  misc_feature: Elevated expression when VOC is produced
  misc_feature: Encodes the peptide sequence at SEQ ID NO 39913
atgatctctaaaacacttactaccattctcacagtcggcagtctggccactgctgcgagcatcacgatgccgcgtgaaacgaacacgccaaaaggaggtgcagccaatgcaaccaggaacctcattattggaggacccgaccttgtccaactggccactttcgatggcacttctttcactctcggcgagagcaatgccacaactggcactgccgcatcctggctacgctggaagtcgtcaacagatacgctgtatgccgttgacgagaacggttctaacttgaacgtcctcactctcgacgaggctaagacgacccaaacttacgtctcgacggtaactggatcgactggtgttgtattcctcgagttcaacaaagaccagacgcgcatggttggcgctgcctatggtcaaggaacaatcgatgtctgggacgtctccgcacaaacccccaagctcatcaagactctcactgttgagggcggtcttggtcctgaccagaccgggcatcatcctcaccaagctcttcttgaccctactggtcgctacttcatcatcaacgatcttggcggcgatcaaatcctgatccttgacggccaggatgacaagtatgagtttgcggatcccgtcacaacccctaaaggaagtggtcctcgacacggtggattcatcacatctggcgacagcacttactacgtgctcgcctgcgagctgtccaacgaggtcttcctgtacgagctcgcatacggtgacaagctcacattcaagcaaatctccgagcaatctagctacggaaccgatcctcctgccaactcatccactgccgcagccggcgaggttcagatcgcaagcaacaacaaagacgtgtacgtctccaaccgtctcagcggcaatgcaaccgacagtcttgcgcacttccagttcgctgacggcgccctcacctacgtcgccgccatctctacccaaggaattttgccccgcatgtttagcctcagtctcgatgagagcgtcgtcttcgtcgccaaccagggcggcgacaagggtcttgttgccttcaagcgttgcactactggcgggactctcaaccctgacgcacttgcttctgttgccaacgctgatattattcccgctccacttgcgggtcaggccaaccaaggacctgagttcattcaggagatttaa

SEQ ID NO: 39913 - protein, 392 aa, Muscodor strobelii
  misc_feature: SGI Peptide ID NO. 573901
  misc_feature (41)..(392): NCBI GI: 46111679 Blast Desc: FG02721.1 [Gibberella zeae PH-1]
  misc_feature (73)..(392): NCBI GI: 256725707 Blast Desc: NECHADRAFT_94437 [Nectria haematococca mpVI 77-13-4]
  misc_feature (35)..(392): NCBI GI: 261359266 Blast Desc: 6-phosphogluconolactonase [Verticillium albo-atrum VaMs.102]
  misc_feature (1)..(392): NCBI GI: 39977457 Blast Desc: MGG_06631 [Magnaporthe grisea 70-15] gi|145015921|gb|EDK00411.1| MGG_06631 [Magnaporthe grisea 70-15]
  misc_feature (27)..(377): NCBI GI: 116196062 Blast Desc: CHGG_04629 [Chaetomium globosum CBS 148.51] gi|88180542|gb|EAQ88010.1| CHGG_04629 [Chaetomium globosum CBS 148.51]
  misc_feature (4)..(367): NCBI GI: 189202692 Blast Desc: 3-carboxymuconate cyclase [Pyrenophora tritici-repentis Pt-1C-BFP] gi|187984781|gb|EDU50269.1| 3-carboxymuconate cyclase [Pyrenophora tritici-repentis
  misc_feature (49)..(362): NCBI GI: 212528948 Blast Desc: conserved [Penicillium marneffei ATCC 18224] gi|210074029|gb|EEA28116.1| conserved [Penicillium marneffei ATCC 18224]
  misc_feature (73)..(351): NCBI GI: 111017682 Blast Desc: 3-carboxymuconate cyclase [Rhodococcus jostii RHA1] gi|110817212|gb|ABG92496.1| 3-carboxymuconate cyclase [Rhodococcus jostii RHA1]
  misc_feature (68)..(360): NCBI GI: 255945365 Blast Desc: Pc20g09550 [Penicillium chrysogenum Wisconsin 54-1255] gi|211588185|emb|CAP86284.1| Pc20g09550 [Penicillium chrysogenum Wisconsin 54-1255]
  misc_feature (55)..(360): NCBI GI: 85106994 Blast Desc: NCU07703 [Neurospora crassa OR74A] gi|28923891|gb|EAA33053.1| [Neurospora crassa OR74A]
  misc_feature: Useful for introducing or modulating the production of volatile compounds
MISKTLTTILTVGSLATAASITMPRETNTPKGGAANATRNLIIGGPDLVQLATFDGTSFTLGESNATTGTAASWLRWKSSTDTLYAVDENGSNLNVLTLDEAKTTQTYVSTVTGSTGVVFLEFNKDQTRMVGAAYGQGTIDVWDVSAQTPKLIKTLTVEGGLGPDQTGHHPHQALLDPTGRYFIINDLGGDQILILDGQDDKYEFADPVTTPKGSGPRHGGFITSGDSTYYVLACELSNEVFLYELAYGDKLTFKQISEQSSYGTDPPANSSTAAAGEVQIASNNKDVYVSNRLSGNATDSLAHFQFADGALTYVAAISTQGILPRMFSLSLDESVVFVANQGGDKGLVAFKRCTTGGTLNPDALASVANADIIPAPLAGQANQGPEFIQEI

SEQ ID NO: 39914 - DNA, 1912 bp, Muscodor strobelii
  misc_feature: SGI EST ID NO. CUFF.96396.0
  misc_feature: Variant of the nucleotide sequence at SEQ ID NO 39912
ctgaacccacgtaagaagatgatatttaaatgtgatctcatcctgagcgactccgagtctgaagacatcgattttgagtaaactaagtggtatcctgaataagtcttcaccgcagccttgtctcctcgagtcaagccattacctgcagcattccacccctggaagaaaaaggcagtgaagtcggctgcaagggtttccgattgctcagtgctcaaaaataaccacagccatttgttttcacggatctgcagttcgcagataaacgagcaataccaaccagtctttgagattcatccaccgagacaatacccttctctgtccattgtgccacttccttgtgtgaagcacattgcaggggaataagccaaagactacctaacaagttttcgttggcaattgttgatttcgaataattccttggatcaattactcagttgccgctcaacactttgttctaattcaagcttagcagccaacagtcaccgcacgaaacaaacgcaagcctttgttcgttcatttacactgtctgtataagaaccaacatcacctcaggaaacaacacagacgcgacttccctttttgctagattgattgtgctaccctgtactgaagctacacacttattgtcaaccctaccaaaatacatacaacatgatctctaaaacacttactaccattctcacagtcggcagtctggccactgctgcgagcatcacgatgccgcgtgaaacgaacacgccaaaaggaggtgcagccaatgcaaccaggaacctcattattggaggacccgaccttgtccaactggccactttcgatggcacttctttcactctcggcgagagcaatgccacaactggcactgccgcatcctggctacgctggaagtcgtcaacagatacgctgtatgccgttgacgagaacggttctaacttgaacgtcctcactctcgacgaggctaagacgacccaaacttacgtctcgacggtaactggatcgactggtgttgtattcctcgagttcaacaaagaccagacgcgcatggttggcgctgcctatggtcaaggaacaatcgatgtctgggacgtctccgcacaaacccccaagctcatcaagactctcactgttgagggcggtcttggtcctgaccagaccgggcatcatcctcaccaagctcttcttgaccctactggtcgctacttcatcatcaacgatcttggcggcgatcaaatcctgatccttgacggccaggatgacaagtatgagtttgcggatcccgtcacaacccctaaaggaagtggtcctcgacacggtggattcatcacatctggcgacagcacttactacgtgctcgcctgcgagctgtccaacgaggtcttcctgtacgagctcgcatacggtgacaagctcacattcaagcaaatctccgagcaatctagctacggaaccgatcctcctgccaactcatccactgccgcagccggcgaggttcagatcgcaagcaacaacaaagacgtgtacgtctccaaccgtctcagcggcaatgcaaccgacagtcttgcgcacttccagttcgctgacggcgccctcacctacgtcgccgccatctctacccaaggaattttgccccgcatgtttagcctcagtctcgatgagagcgtcgtcttcgtcgccaaccagggcggcgacaagggtcttgttgccttcaagcgttgcactactggcgggactctcaaccctgacgcacttgcttctgttgccaacgctgatattattcccgctccacttgcgggtcaggccaaccaaggacctgagttcattcaggagatttaatcatttcatcgctggtcgatccggaaagtaagtggtgcatgaaaaggcgtttgggggaggttcggttgcttcatgatagatg

SEQ ID NO: 39915 - DNA, 1326 bp, Muscodor strobelii
  misc_feature: SGI cDNA ID NO. 573902
  misc_feature: Reduced expression when VOC is produced
  misc_feature: Encodes the peptide sequence at SEQ ID NO 39916
atggtgcgagcgattccggcgctggccactctggccctgtacggcagtgccatcgccgcgtcttccgccaaatgcacagccagtaacaagtgtcccgaaagctcgccttgctgttcacaatatggtgaatgcggtgttggtgcttactgcctgggtggctgcgatcctctctcctccttctctctagacgcttgcatgcccgcgccggtttgcgagtcgaagaaaatgccaatggacagtcttgatggtatcatggatcagagcaaatacctcggcgacccatctaaagccgactgggtcgcctcaggcactcccttagcatacaacggaaacgtgcttttgacaatgcctgccaactcatcaggcaccgttctcgcttcaaccacatacatgtggtatggaaatgtctcagtcaccatgaagacttcgaaagacgctggtgttattaccgctttcattttcctcggcgacgtgaaagatgagatcgattacgaatgggtcggcaccgagctgacaattgcccaaaccaacttcttctggcaggctcagaccgttgagggaagccctggtaatatcacgggtctctccaatgtcaacgagaacttccacacgtatacggttgagtggctaccagagtccatcaagtggtatgtggacggcgaacttggaatgacacggctcaagtccgatacttggaacaaaacgggcaaccagtgggatttcccgcaaacgccagcacgcattcaactttccgtctggcctggtggtgcgagttccaacgctcctggaaccatcgaatgggcaggtggcccgattgactggaatagtgatgctatcaaagaggatggctactactatgcgacgatcggcgaggtcaccttcgactgttatcaaaccaacaagccaccagggacgaactcgggcaagagttatacctacaccggtgcctcgggcctgaacaataccgttgaagatggagacaaggacacgacgttgtcatcaatcttcaactctgggcttgacccaaacaagagtcaagataatgacgaccccgctcagaccagtgcagcaacagtcccaggtggcagcacacaaggcactggacagggcggtccctctcaaggcggttcaggcagcggcaaaggcggcaccaatgacagcggagatgacggtagttcgagtggaagctcatgtactagtggtagcttctcccagaacggctgcgacgaagatggggacggaaccagcgaaggctcgcgtaatggtgccttcggtgccagtgcctttgctgctctgatagctgtagccggcatgttgtggttgtag

SEQ ID NO: 39916 - protein, 441 aa, Muscodor strobelii
  misc_feature: SGI Peptide ID NO. 573902
  misc_feature (93)..(269): Pfam Id: PF00722 Pfam Desc: Glycosyl hydrolases family 16
  misc_feature (16)..(441): NCBI GI: 116191299 Blast Desc: CHGG_05367 [Chaetomium globosum CBS 148.51] gi|88181280|gb|EAQ88748.1| CHGG_05367 [Chaetomium globosum CBS 148.51]
  misc_feature (1)..(441): NCBI GI: 171681098 Blast Desc: protein product [Podospora anserina] gi|170940507|emb|CAP65735.1| protein product [Podospora anserina]
  misc_feature (2)..(363): NCBI GI: 85109707 Blast Desc: NCU05686 [Neurospora crassa OR74A] gi|28924698|gb|EAA33812.1| conserved [Neurospora crassa OR74A]
  misc_feature (1)..(371): NCBI GI: 156060717 Blast Desc: SS1G_02501 [Sclerotinia sclerotiorum 1980] gi|154699905|gb|EDN99643.1| SS1G_02501 [Sclerotinia sclerotiorum 1980]
  misc_feature (2)..(441): NCBI GI: 39973439 Blast Desc: conserved [Magnaporthe grisea 70-15] gi|58257415|gb|AAW69329.1| UTR2 protein-like protein [Magnaporthe grisea] gi|145017894|gb|EDK02173.1| conserved [Magnaporthe grisea
  misc_feature (1)..(441): NCBI GI: 46111677 Blast Desc: FG02720.1 [Gibberella zeae PH-1]
  misc_feature (17)..(441): NCBI GI: 256725704 Blast Desc: NECHADRAFT_123363 [Nectria haematococca mpVI 77-13-4]
  misc_feature (1)..(339): NCBI GI: 154314010 Blast Desc: BC1G_04948 [Botryotinia fuckeliana B05.10] gi|150849094|gb|EDN24287.1| BC1G_04948 [Botryotinia fuckeliana B05.10]
  misc_feature (40)..(373): NCBI GI: 261359271 Blast Desc: UTR2 protein [Verticillium albo-atrum VaMs.102]
  misc_feature (1)..(371): NCBI GI: 226292912 Blast Desc: cell wall glucanase (Utr2) [Paracoccidioides brasiliensis Pb18]
  misc_feature: Useful for introducing or modulating the production of volatile compounds
MVRAIPALATLALYGSAIAASSAKCTASNKCPESSPCCSQYGECGVGAYCLGGCDPLSSFSLDACMPAPVCESKKMPMDSLDGIMDQSKYLGDPSKADWVASGTPLAYNGNVLLTMPANSSGTVLASTTYMWYGNVSVTMKTSKDAGVITAFIFLGDVKDEIDYEWVGTELTIAQTNFFWQAQTVEGSPGNITGLSNVNENFHTYTVEWLPESIKWYVDGELGMTRLKSDTWNKTGNQWDFPQTPARIQLSVWPGGASSNAPGTIEWAGGPIDWNSDAIKEDGYYYATIGEVTFDCYQTNKPPGTNSGKSYTYTGASGLNNTVEDGDKDTTLSSIFNSGLDPNKSQDNDDPAQTSAATVPGGSTQGTGQGGPSQGGSGSGKGGTNDSGDDGSSSGSSCTSGSFSQNGCDEDGDGTSEGSRNGAFGASAFAALIAVAGMLWL

SEQ ID NO: 39917 - DNA, 2306 bp, Muscodor strobelii
  misc_feature: SGI EST ID NO. CUFF.96424.0
  misc_feature: Variant of the nucleotide sequence at SEQ ID NO 39915
ggcaattgctgtataaaaatgacacgaccaacaactgtcagacagaaccagtgcggatgagctggccgacgctcactgctccctaatctgaaaatggaaacacaaccatttcgcccacacaccccctgcgcatttccagtcccattccatactaccgtgattaatctggtcctcatcaggttttcttggcttttcttccaactccatccctctttcaatcttgtttcatcagtactctcgtttttcatcccctcgtttgacgtctggtctaccccagcgacgtgaaggtagtttggtgggaagtatcaggattggagttcgagtgacacgcccagttttgaagcgattactcctactcattcaagccctttgatctgtgcttccttctcctttgacacacttcgacattttgcgcataatacccattttccgccactcgaacctgtcgtcattcgcttttcaacttcgatacattaatctttagcctactactatcgctcatctctcgatccacactatccgcaatacgccgatagaagatattgtaccgttacgactatttgtgagacgcgatatacataataatccggcgaccgacgattccgatcttatacttgagaaactgtgctcgcatctaccaacgcgaggattatcgagacttgagctgcagcaaccatggtgcgagcgattccggcgctggccactctggccctgtacggcagtgccatcgccgcgtcttccgccaaatgcacagccagtaacaagtgtcccgaaagctcgccttgctgttcacaatatggtgaatgcggtgttggtgcttactgcctgggtggctgcgatcctctctcctccttctctctagacgcttgcatgcccgcgccggtttgcgagtcgaagaaaatgccaatggacagtcttgatggtatcatggatcagagcaaatacctcggcgacccatctaaagccgactgggtcgcctcaggcactcccttagcatacaacggaaacgtgcttttgacaatgcctgccaactcatcaggcaccgttctcgcttcaaccacatacatgtggtatggaaatgtctcagtcaccatgaagacttcgaaagacgctggtgttattaccgctttcattttcctcggcgacgtgaaagatgagatcgattacgaatgggtcggcaccgagctgacaattgcccaaaccaacttcttctggcaggctcagaccgttgagggaagccctggtaatatcacgggtctctccaatgtcaacgagaacttccacacgtatacggttgagtggctaccagagtccatcaagtggtatgtggacggcgaacttggaatgacacggctcaagtccgatacttggaacaaaacgggcaaccagtgggatttcccgcaaacgccagcacgcattcaactttccgtctggcctggtggtgcgagttccaacgctcctggaaccatcgaatgggcaggtggcccgattgactggaatagtgatgctatcaaagaggatggctactactatgcgacgatcggcgaggtcaccttcgactgttatcaaaccaacaagccaccagggacgaactcgggcaagagttatacctacaccggtgcctcgggcctgaacaataccgttgaagatggagacaaggacacgacgttgtcatcaatcttcaactctgggcttgacccaaacaagagtcaagataatgacgaccccgctcagaccagtgcagcaacagtcccaggtggcagcacacaaggcactggacagggcggtccctctcaaggcggttcaggcagcggcaaaggcggcaccaatgacagcggagatgacggtagttcgagtggaagctcatgtactagtggtagcttctcccagaacggctgcgacgaagatggggacggaaccagcgaaggctcgcgtaatggtgccttcggtgccagtgcctttgctgctctgatagctgtagccggcatgttgtggttgtagaagctgtttgatgtgttagaaaaattgctaacgcaaaggaatcaagagttcgacattatatattccccggattgattgagcgaggaaataattcgtgtcttaactagtatggcattggcatcggcgtatatatgttaatatctgtggcctggtctgtctttatctgcctaagtcagaaatcaatatgttttaattagagatcattgcttctcagcccaagactttcgtcccttgtgctcctctctctgaagacagggaaagctctgccagaagttaatgattcgtggcaaacatttcttcgtcta

SEQ ID NO: 39918 - DNA, 2049 bp, Muscodor strobelii
  misc_feature: SGI cDNA ID NO. 573903
  misc_feature: Reduced expression when VOC is produced
  misc_feature: Encodes the peptide sequence at SEQ ID NO 39919
atggaaggaagcaaaacattctctaaagactttatgaagaaacatggcattcctactgctgcgtacgagaacttctcggactacgacaaagctcgtcagtatctggaaagcgtccaacatgacgtcgtgattaaagccagcgggcttgcggcgggtaagggcgtgatcatgccctctaccaaagaagatgcacacaaagccctgaaagaaatcatgttgaataaggagtttggttctgctggcgatgaggttgttatcgaggaattcttgtctggcgatgagcttagtattctgaccttcagcgatggacacacaatcagatcactgcccccagctcaagatcacaagagaattggggaaggcgacacgggtttgaataccggtggcatgggatgctatgcgccgacgcaaatcgccacacctcaactcatcgctcaaatcgaccgcgatatcatacagcctagtatcgacggtatgtgccttgataggataccctttaagggagtcctgtttactggtcttatgatcactgcctcgggacctaaggtgctagagtacaacgttcgatttggagacccagagacccagacggttttaccactgctatcagacgacacagacctggcagaaatcatgcttgcatgcactgagggctaccttcgcagtgttgacatcaaaatcaaggacgaatttagcaccaccgtggttgtgtctgctggtgggtatcccgaatcctacgcaaagggcgacgagattacagttcagccaactccgcccaacgtcaacattttccatgccggcaccaagttaacgaaggatggcaagttccagacagcaggaggtagagtgatagccgcaagcgccacagccagcgagagcttgcgagccgcagtagacaaggcgtacgaaggtgtcaagctcatccaattcaaagacatgtactaccgcaaagatatcgcacacagggcattccggccaacggcagataccaaggaggcattgacctacgcaaacgcgggtgtcgatattgaagcaggaaaccagttcgtggagcggatacgaaaggctgttcgatctacagcacgacctggcgccgacgcagaaatcggagggtttggaggtgaagtcgatctctcgaaagctggttttgcggccgatgctccgatcatggtcggtgctatcgatggtgttggaacaaaacttatgatcgcacaggcgatgaaagatcacagcactgttggcatcgatctcgtagccatgaacgtaaacgacctagtggttcagggtgccgagccacttatgttcctcgactactatggatgcagcaagcttaatcctgaagtagcagcacaatttgtcgagagtgtggccgctggttgccgcgacgcccggtgtgctttggttggaggtgaaacagcagagatgcccgggatgtaccgtgatgatgactatgatgctgccggcgctgcaatcggttctatgcttcctggcaatcgtctcccacgcctggatgctatgcgacctggagatatactccttggcctcgcttcttcgggtgtccactcgaatggcttctcgctagtgcgccgaataattgcacgggaaaacctcgagtactcatctcctgctccttgggctccctcaactacagttggtgattcgcttctcacgccgacgcgtatctacgttcgctctgttctgaaggcgttgccacacctcaagggcctcgcacatatcacaggcggcggtttattagaaaacgttccacgtatgcttccctcgcatctcgcggcttccatagatgtcagcaaatgggagcttccggccgttttcaagtggctgaagaaggcgggtaacgtcgaagcaacggagatggggcggactttcaacactggcgtgggtatggtcgcagtcgtgaacggtgcagacgttgataacgtagtgaagatactacaggatgagggcgagacggtgtacgttatcggtggcctactcgagaggccccaaggcggtgaaggctgtgtcctgaagggattagagtcatggtag

SEQ ID NO: 39919 - protein, 682 aa, Muscodor strobelii
  misc_feature: SGI Peptide ID NO. 573903
  misc_feature (332)..(495): Pfam Id: PF00586 Pfam Desc: AIR synthase related protein, N-terminal domain
  misc_feature (507)..(675): Pfam Id: PF02769 Pfam Desc: AIR synthase related protein, C-terminal domain
  misc_feature (3)..(195): Pfam Id: PF01071 Pfam Desc: Phosphoribosylglycinamide synthetase, ATP-grasp (A) domain
  misc_feature (231)..(324): Pfam Id: PF02843 Pfam Desc: Phosphoribosylglycinamide synthetase, C domain
  misc_feature (1)..(682): NCBI GI: 156064597 Blast Desc: SS1G_00306 [Sclerotinia sclerotiorum 1980] gi|154691168|gb|EDN90906.1| SS1G_00306 [Sclerotinia sclerotiorum 1980]
  misc_feature (1)..(682): NCBI GI: 154322999 Blast Desc: BC1G_00842 [Botryotinia fuckeliana B05.10] gi|150848176|gb|EDN23369.1| BC1G_00842 [Botryotinia fuckeliana B05.10]
  misc_feature (1)..(682): NCBI GI: 145614362 Blast Desc: MGG_11343 [Magnaporthe grisea 70-15] gi|145021298|gb|EDK05427.1| MGG_11343 [Magnaporthe grisea 70-15]
  misc_feature (1)..(682): NCBI GI: 85079695 Blast Desc: NCU00177 [Neurospora crassa OR74A] gi|28917463|gb|EAA27164.1| NCU00177 [Neurospora crassa OR74A]
  misc_feature (1)..(682): NCBI GI: 256726210 Blast Desc: [Nectria haematococca mpVI 77-13-4]
  misc_feature (1)..(682): NCBI GI: 171686968 Blast Desc: protein product [Podospora anserina] gi|170943445|emb|CAP69098.1| protein product [Podospora anserina]
  misc_feature (1)..(682): NCBI GI: 46111249 Blast Desc: FG02506.1 [Gibberella zeae PH-1]
  misc_feature (1)..(682): NCBI GI: 116191805 Blast Desc: CHGG_05620 [Chaetomium globosum CBS 148.51] gi|88181533|gb|EAQ89001.1| CHGG_05620 [Chaetomium globosum CBS 148.51]
  misc_feature (1)..(682): NCBI GI: 145250165 Blast Desc: An15g00570 [Aspergillus niger] gi|134082110|emb|CAK42226.1| protein product [Aspergillus niger]
  misc_feature (1)..(682): NCBI GI: 115386238 Blast Desc: phosphoribosylformylglycinamidine cyclo-ligase [Aspergillus terreus NIH2624] gi|114190658|gb|EAU32358.1| phosphoribosylformylglycinamidine cyclo-ligase [Aspergillus
  misc_feature (1)..(682): SWISSPROT Homolog: EC 6.3.4.13 Phosphoribosylamine--glycine ligase
  misc_feature (1)..(682): SWISSPROT Homolog: EC 6.3.3.1 Phosphoribosylformylglycinamidine cyclo-ligase
  misc_feature: Useful for introducing or modulating the production of volatile compounds
MEGSKTFSKDFMKKHGIPTAAYENFSDYDKARQYLESVQHDVVIKASGLAAGKGVIMPSTKEDAHKALKEIMLNKEFGSAGDEVVIEEFLSGDELSILTFSDGHTIRSLPPAQDHKRIGEGDTGLNTGGMGCYAPTQIATPQLIAQIDRDIIQPSIDGMCLDRIPFKGVLFTGLMITASGPKVLEYNVRFGDPETQTVLPLLSDDTDLAEIMLACTEGYLRSVDIKIKDEFSTTVVVSAGGYPESYAKGDEITVQPTPPNVNIFHAGTKLTKDGKFQTAGGRVIAASATASESLRAAVDKAYEGVKLIQFKDMYYRKDIAHRAFRPTADTKEALTYANAGVDIEAGNQFVERIRKAVRSTARPGADAEIGGFGGEVDLSKAGFAADAPIMVGAIDGVGTKLMIAQAMKDHSTVGIDLVAMNVNDLVVQGAEPLMFLDYYGCSKLNPEVAAQFVESVAAGCRDARCALVGGETAEMPGMYRDDDYDAAGAAIGSMLPGNRLPRLDAMRPGDILLGLASSGVHSNGFSLVRRIIARENLEYSSPAPWAPSTTVGDSLLTPTRIYVRSVLKALPHLKGLAHITGGGLLENVPRMLPSHLAASIDVSKWELPAVFKWLKKAGNVEATEMGRTFNTGVGMVAVVNGADVDNVVKILQDEGETVYVIGGLLERPQGGEGCVLKGLESW

SEQ ID NO: 39920 - DNA, 369 bp, Muscodor strobelii
  misc_feature: SGI cDNA ID NO. 573904
  misc_feature: Reduced expression when VOC is produced
  misc_feature: Encodes the peptide sequence at SEQ ID NO 39921
atggctatcaaaacgcccctccgcatcttgctaatcgggaacggtggtagagagcatgctattgcctggaagttaagccagtctgatctggttgaatcgataatagcagtacctggcaatggaggcacggcttcttgtcccaagactacaaacaacacttccgtctctcctgattgtttcgagtcactgcttgacttagcaaagaagaataacatcaactatgttgttcctgggccggaagcacctctggttgccggtgctgttgatttcttcgaagatgctggtatcaaatctttcggcccttccaaagctgccgcatgtgagtatcgaaatcattgcacatcgaagatctattttacctttacctga

SEQ ID NO: 39921 - protein, 122 aa, Muscodor strobelii
  misc_feature: SGI Peptide ID NO. 573904
  misc_feature (7)..(108): Pfam Id: PF02844 Pfam Desc: Phosphoribosylglycinamide synthetase, N domain
  misc_feature (7)..(106): Pfam Id: PF02844 Pfam Desc: Phosphoribosylglycinamide synthetase, N domain
  misc_feature (7)..(119): NCBI GI: 116191805 Blast Desc: CHGG_05620 [Chaetomium globosum CBS 148.51] gi|88181533|gb|EAQ89001.1| CHGG_05620 [Chaetomium globosum CBS 148.51]
  misc_feature (7)..(119): NCBI GI: 171686968 Blast Desc: protein product [Podospora anserina] gi|170943445|emb|CAP69098.1| protein product [Podospora anserina]
  misc_feature (7)..(106): NCBI GI: 154322999 Blast Desc: BC1G_00842 [Botryotinia fuckeliana B05.10] gi|150848176|gb|EDN23369.1| BC1G_00842 [Botryotinia fuckeliana B05.10]
  misc_feature (3)..(106): NCBI GI: 261360104 Blast Desc: phosphoribosylamine-glycine ligase [Verticillium albo-atrum VaMs.102]
  misc_feature (7)..(119): NCBI GI: 145614362 Blast Desc: MGG_11343 [Magnaporthe grisea 70-15] gi|145021298|gb|EDK05427.1| MGG_11343 [Magnaporthe grisea 70-15]
  misc_feature (6)..(106): NCBI GI: 156064597 Blast Desc: SS1G_00306 [Sclerotinia sclerotiorum 1980] gi|154691168|gb|EDN90906.1| SS1G_00306 [Sclerotinia sclerotiorum 1980]
  misc_feature (7)..(119): NCBI GI: 85079695 Blast Desc: NCU00177 [Neurospora crassa OR74A] gi|28917463|gb|EAA27164.1| NCU00177 [Neurospora crassa OR74A]
  misc_feature (7)..(106): NCBI GI: 46111249 Blast Desc: FG02506.1 [Gibberella zeae PH-1]
  misc_feature (7)..(106): NCBI GI: 256726210 Blast Desc: [Nectria haematococca mpVI 77-13-4]
  misc_feature (3)..(106): NCBI GI: 226285678 Blast Desc: phosphoribosylamine-glycine ligase [Paracoccidioides brasiliensis Pb01]
  misc_feature (7)..(119): SWISSPROT Homolog: EC 6.3.4.13 Phosphoribosylamine--glycine ligase
  misc_feature (7)..(119): SWISSPROT Homolog: EC 6.3.3.1 Phosphoribosylformylglycinamidine cyclo-ligase
  misc_feature: Useful for introducing or modulating the production of volatile compounds
MAIKTPLRILLIGNGGREHAIAWKLSQSDLVESIIAVPGNGGTASCPKTTNNTSVSPDCFESLLDLAKKNNINYVVPGPEAPLVAGAVDFFEDAGIKSFGPSKAAACEYRNHCTSKIYFTFT

SEQ ID NO: 39922 - DNA, 345 bp, Muscodor strobelii
  misc_feature: SGI cDNA ID NO. 573905
  misc_feature: Reduced expression when VOC is produced
  misc_feature: Encodes the peptide sequence at SEQ ID NO 39923
atgctctacgagttaataggaattgttcgaccaggcaatatcgccgaagtcagagaaattgtcctagcaaccggacagatcattctcaaagaccggggcgtaatccgcggcatccagaactggggcgtgttctccttaccaaaagccatctccgcgcatcagctgcgacacaaagacggacactacttcgccatgcgcttcgactcgagtatagagactcaaaatgaggtgcgcaagagtttgcgcctcgatccgagaatgatcaggcatacaagtgtgaagttgggtgatggaaaactaggcacgatgagcaggattggtgctattgattggaaaagagaataa

SEQ ID NO: 39923 - protein, 114 aa, Muscodor strobelii
  misc_feature: SGI Peptide ID NO. 573905
  misc_feature (1)..(112): NCBI GI: 116191195 Blast Desc: CHGG_05315 [Chaetomium globosum CBS 148.51] gi|88181228|gb|EAQ88696.1| CHGG_05315 [Chaetomium globosum CBS 148.51]
  misc_feature (1)..(112): NCBI GI: 85109410 Blast Desc: NCU05717 [Neurospora crassa OR74A] gi|28924546|gb|EAA33667.1| [Neurospora crassa OR74A]
  misc_feature (1)..(112): NCBI GI: 256725708 Blast Desc: [Nectria haematococca mpVI 77-13-4]
  misc_feature (1)..(112): NCBI GI: 46111687 Blast Desc: FG02725.1 [Gibberella zeae PH-1]
  misc_feature (1)..(111): NCBI GI: 156059096 Blast Desc: SS1G_03560 [Sclerotinia sclerotiorum 1980] gi|154701347|gb|EDO01086.1| SS1G_03560 [Sclerotinia sclerotiorum 1980]
  misc_feature (1)..(113): NCBI GI: 171681160 Blast Desc: protein product [Podospora anserina] gi|170940538|emb|CAP65766.1| protein product [Podospora anserina]
  misc_feature (1)..(111): NCBI GI: 39942080 Blast Desc: MGG_03120 [Magnaporthe grisea 70-15] gi|145015906|gb|EDK00396.1| MGG_03120 [Magnaporthe grisea 70-15]
  misc_feature (1)..(112): NCBI GI: 259488620 Blast Desc: TPA: 37S ribosomal protein Mrp17 (AFU_orthologue; AFUA_1G12065) [Aspergillus nidulans FGSC A4]
  misc_feature (1)..(113): NCBI GI: 261187816 Blast Desc: 30S ribosomal protein S6 [Ajellomyces dermatitidis SLH14081] gi|239593539|gb|EEQ76120.1| 30S ribosomal protein S6 [Ajellomyces dermatitidis SLH14081] gi|239613306|gb|EEQ90293.1|
  misc_feature (1)..(111): NCBI GI: 70995638 Blast Desc: 37S ribosomal protein Mrp17 [Aspergillus fumigatus Af293] gi|66850209|gb|EAL90536.1| 37S ribosomal protein Mrp17 [Aspergillus fumigatus Af293] gi|159131329|gb|EDP56442.1| 37S
  misc_feature: Useful for introducing or modulating the production of volatile compounds
MLYELIGIVRPGNIAEVREIVLATGQIILKDRGVIRGIQNWGVFSLPKAISAHQLRHKDGHYFAMRFDSSIETQNEVRKSLRLDPRMIRHTSVKLGDGKLGTMSRIGAIDWKRE

SEQ ID NO: 39924 - DNA, 876 bp, Muscodor strobelii
  misc_feature: SGI EST ID NO. CUFF.96555.1
  misc_feature: Variant of the nucleotide sequence at SEQ ID NO 39922
acagtacggatcaagcccagaagactgtacagtctaatgccttatcgttatcgaaaattaccagcttcaatgttgcaatgtcagagcctctcgtccttttcttggtcggcattaacgaacatttcgctccctgaacaacaaagtgttatccgcggcaatatcgatttccacacgcgaccccatagactcccgaagcaaccgaagtgagcgacatctccggaagagaggaggagaacagaagaggaggaaggggccgtggcgcgtcacaacgattacctcaacacctcaaccgtcatcgagcaatcgccagcatgctctacgagttaataggaattgttcgaccaggcaatatcgccgaagtcagagaaattgtcctagcaaccggacagatcattctcaaagaccggggcgtaatccgcggcatccagaactggggcgtgttctccttaccaaaagccatctccgcgcatcagctgcgacacaaagacggacactacttcgccatgcgcttcgactcgagtatagagactcaaaatgaggtgcgcaagagtttgcgcctcgatccgagaatgatcaggcatacaagtgtgaagttgggtgatggaaaactaggcacgatgagcaggattggtgctattgattggaaaagagaataagacttcgtgagatgcggtatgggatggtaatagattggggagtgtacaaggaagaccagatgcaactgtctactctctgagtggacatttcactccgttgcggcttgcattgtacatgtgttcggcgatagatttgtgtgtataaaatagccgaacagactagagcggtgtatgctatcgtgtataaacaatatgtacgaacaaacagtgcgatgcgtcg

SEQ ID NO: 39925 - DNA, 870 bp, Muscodor strobelii
  misc_feature: SGI cDNA ID NO. 573906
  misc_feature: Encodes the peptide sequence at SEQ ID NO 39926
atgccatctatccgcaacaaattcgccccaaacacaaaagtcttagtcgcaataggaggatggggtgacaacaaaggattccctatcgcggcacgatctgaatctagtcgcaaggcatttgccgcgaacgtggctcagatggtccacgatacaggggcagacggtgtagacattgactgggagtatccgggcggaaacggagaagattataaacaaaatccaaatgctgggaaacagtgggagatcgaggcgtttccgtctctgttgtccgagctacgagccgctctgggcccgggcctaattttatctgcagcggtgccgggactggaacgagacatgatggcctttactaaaggaaccgtcccaaagatcaatgaatctcttgattttgttaatgtcatgacgtacgatcttatgaaccggagagatttcgtcacaaaacaccatgctgggataaaagggtctacagagtccatcgacgcttatatcagccgcggattcccgcctgagaaactcaacctcgggttcgcattctacgtcaaatggttcgacactgaggctttaccgtcagcatcaaatccaataggtcacaaaaccgtcctcttagaggatccggacgatggctcggacaagggacactccggggcgaatataaatggtatctacgatgaagacgggggtggccatttctactacgacccgaagcgtaggagatggtggacttgggagacacctgattctatccgcaagaaattccagagcttggttccggctaggaggcttggaggtgtgttcgcttgggcattaggggaagactcgccggtttatgaacatgctcatgcgttagctgatgcagtgtcgaattcttga

SEQ ID NO: 39926 - protein, 289 aa, Muscodor strobelii
  misc_feature: SGI Peptide ID NO. 573906
  misc_feature (2)..(272): Pfam Id: PF00704 Pfam Desc: Glycosyl hydrolases family 18
  misc_feature (10)..(272): Pfam Id: PF00704 Pfam Desc: Glycosyl hydrolases family 18
  misc_feature (5)..(289): NCBI GI: 261358556 Blast Desc: chitinase 18-4 [Verticillium albo-atrum VaMs.102]
  misc_feature (4)..(288): NCBI GI: 164425616 Blast Desc: NCU06020 [Neurospora crassa OR74A] gi|157070997|gb|EAA30374.2| NCU06020 [Neurospora crassa OR74A]
  misc_feature (1)..(289): NCBI GI: 39945868 Blast Desc: MGG_08054 [Magnaporthe grisea 70-15] gi|145019291|gb|EDK03519.1| MGG_08054 [Magnaporthe grisea 70-15]
  misc_feature (3)..(289): NCBI GI: 67515879 Blast Desc: AN0221.2 [Aspergillus nidulans FGSC A4] gi|40746938|gb|EAA66094.1| AN0221.2 [Aspergillus nidulans FGSC A4] gi|259489567|tpe|CBF89945.1| TPA: conserved [Aspergillus FGSC
  misc_feature (3)..(283): NCBI GI: 189206183 Blast Desc: chitinase 18-4 [Pyrenophora tritici-repentis Pt-1C-BFP] gi|187975519|gb|EDU42145.1| chitinase 18-4 [Pyrenophora tritici-repentis Pt-1C-BFP]
  misc_feature (4)..(282): NCBI GI: 171680857 Blast Desc: protein product [Podospora anserina] gi|27764323|emb|CAD60603.1| protein product [Podospora anserina] gi|170940056|emb|CAP65283.1| protein product [Podospora anserina]
  misc_feature (4)..(286): NCBI GI: 225561819 Blast Desc: chitinase [Ajellomyces capsulatus G186AR]
  misc_feature (4)..(286): NCBI GI: 240275425 Blast Desc: chitinase [Ajellomyces capsulatus H143]
  misc_feature (4)..(286): NCBI GI: 154283367 Blast Desc: HCAG_02650 [Ajellomyces capsulatus NAm1] gi|150410659|gb|EDN06047.1| HCAG_02650 [Ajellomyces capsulatus NAm1]
  misc_feature (1)..(286): NCBI GI: 212533965 Blast Desc: Acidic mammalian chitinase precursor, [Penicillium marneffei ATCC 18224] gi|210072503|gb|EEA26592.1| Acidic mammalian chitinase precursor, [Penicillium marneffei ATCC 18224]
  misc_feature (11)..(267): SWISSPROT Homolog: EC 3.2.1.14 Chitinase
MPSIRNKFAPNTKVLVAIGGWGDNKGFPIAARSESSRKAFAANVAQMVHDTGADGVDIDWEYPGGNGEDYKQNPNAGKQWEIEAFPSLLSELRAALGPGLILSAAVPGLERDMMAFTKGTVPKINESLDFVNVMTYDLMNRRDFVTKHHAGIKGSTESIDAYISRGFPPEKLNLGFAFYVKWFDTEALPSASNPIGHKTVLLEDPDDGSDKGHSGANINGIYDEDGGGHFYYDPKRRRWWTWETPDSIRKKFQSLVPARRLGGVFAWALGEDSPVYEHAHALADAVSNS

SEQ ID NO: 39927 - DNA, 2460 bp, Muscodor strobelii
  misc_feature: SGI cDNA ID NO. 573907
  misc_feature: Encodes the peptide sequence at SEQ ID NO 39928
atggccgactcatacgattacggcattgatgccctactcgacactggagatatcaattttgatttcaacgatgaggacaaaggcggtccgagtctagaggatactctgggagcaatcgagggccctaataacattgtatctccccaggttaaggtcgagcccggaattgagaaacccgatgagcgacccctcgcgactgaccaacagtatcaaaccgtaaatctgcaagaagtggctgctcccacggctgatgaaaggcttgcaatttctgttcctaccagtgccgagattgagagtgcaatcgccaatgaattgaacttcaatgctaacgggtttgccttggcccagggctcggacaatcaatttatcgatgatagccaaaatggcttcgaatggagttatcaaccagcgcaaggggaacaacccctgaacagccaagtttactacgactcgaccaccgctgacatgcccgtgtcaaacaattggtcaaatggtatgtcaaatggtatgccaaatggtatgtcaaatggtatgccaaatggtatgcaaaatggtatgcaaaatggtatgcaaaatggtatgcaaaatggtatgtcaaaccacatgttaaatccggtggcccatgggcaacccatgcaatccgtgcaccagatgcaacatccagcacaaccgtactataatcccaacaggtatggaacagcacatccttcgccccctgagctcatgcctgttgtaactcatcatgagctgctcgacgtcccccctcgtcatgacccacgtgtgatggcacccggtcaataccatgtgaacagccatggaacattgtctgtgtcaagggtaggtcttaactctaggggtccacccacggctgatccggattcagatgacgacggttttgtccctcgtcccaaccgtctcaaatttgatcatggtaaagagccactggcaaagggtaagatccctcgctccgtcaacagacaggagaatgcgcgtgatgaagccttgaagtactacggctcagcgccaccgtctcccaggagttggggcccaaaaggcccagatggcaatcatatcttcacctatacccaatacggagaactcgctcctgcaaaggtcttcacgaagcgggaaatgagaatctatttgctaggaccaagcgataaagaacgcgatggttttgatatgcctgagatattgccgggcgtcaggaagaaccggaacaaaatacgacaaggcctcacgctttggatcggagagcctgccgctcaggcaaaccaacgattcccacgtcaaggtcatagtaccaaatgtcggtacgcggattgtgagtatcaagcgcgtacgattagacctgggaatttcatcgttgtctttgacgagcgacaaaatgaggatggggagactatcgacccatatcacaacgccggatatgcccacctttggtgcatagagaagtgtctcgacttggtgaaactatggaagcacgtagatattcggctcgactatcgaacgttcgttcgagaggaatactctccattcaagattaactctcaagggatgggaagcgaaaaggtcaagaatgaatggtggcaacgaaactgttatgcggtgagaccgcggggccacaagaggacttacaaggattcgcttacaaacgccctgacggaatataaaaacgcccataggacgtcagggcaaaagaaagcacaagaaagaagaaagggtgtcgacgcttctaagcatcacaatgacccggaattgatcagacgtctcaaggaagaagcagctctcaagaagaaggcaaatgcgaatgagaggaaagaaaagaaacaggtaaggagaaatagcatgaagtcgcaactctcggaaccagattctgacgccgagtctggagttgattatgtggttgagcgtgaacatgagcgccaacttgatcgccaacttcagcccagcgttgagcccagagttgagcccagagttgagcccagagttgagcctcgagccatcatcgaccccaacatcgatcccagactctcgaatcttcccatcagtcccccggcaactcctcctgtaagtcctccagtcacaagcaacgcacccgccgatgtaaacaccaagtatgttgacgtgggtgtacagtttccctctccgccgcgttctctcactcctactcctcgccgcactccttccccaactcctctcaagcgccgtcatgacgatgatgacgacgacgatgaggaggactcgcgtcctataaagcgcgaaaagatggattctgactcagagtccatggatgaggaggaggagctcgaggcttacttcatgaacgcaaagggtggttcgccaatgagtagaagtcctagcaggggcagcagtaagtatccgtctcccaagtcttctcctagatctccaccacgacacgtcaatgtcaaacgagagagcaaggagataaaatggtaa

SEQ ID NO: 39928 - protein, 819 aa, Muscodor strobelii
  misc_feature: SGI Peptide ID NO. 573907
  misc_feature (314)..(599): NCBI GI: 116208212 Blast Desc: CHGG_03399 [Chaetomium globosum CBS 148.51] gi|88183996|gb|EAQ91464.1| CHGG_03399 [Chaetomium globosum CBS 148.51]
  misc_feature (342)..(607): NCBI GI: 171685582 Blast Desc: protein product [Podospora anserina] gi|170942752|emb|CAP68405.1| protein product [Podospora anserina]
  misc_feature (337)..(505): NCBI GI: 154309734 Blast Desc: BC1G_07337 [Botryotinia fuckeliana B05.10] gi|150851798|gb|EDN26991.1| BC1G_07337 [Botryotinia fuckeliana B05.10]
  misc_feature (337)..(633): NCBI GI: 156052012 Blast Desc: SS1G_07414 [Sclerotinia sclerotiorum 1980] gi|154705191|gb|EDO04930.1| SS1G_07414 [Sclerotinia sclerotiorum 1980]
  misc_feature (338)..(649): NCBI GI: 256733313 Blast Desc: [Nectria haematococca mpVI 77-13-4]
  misc_feature (421)..(509): NCBI GI: 261354112 Blast Desc: [Verticillium albo-atrum VaMs.102]
  misc_feature (333)..(532): NCBI GI: 85086603 Blast Desc: NCU00238 [Neurospora crassa OR74A] gi|28918804|gb|EAA28473.1| [Neurospora crassa OR74A]
  misc_feature (343)..(616): NCBI GI: 145604481 Blast Desc: [Magnaporthe grisea 70-15] gi|145012473|gb|EDJ97127.1| [Magnaporthe grisea 70-15]
  misc_feature (413)..(574): NCBI GI: 169599088 Blast Desc: SNOG_02359 [Phaeosphaeria nodorum SN15] gi|160704531|gb|EAT90571.2| SNOG_02359 [Phaeosphaeria nodorum SN15]
  misc_feature (356)..(509): NCBI GI: 189208698 Blast Desc: [Pyrenophora tritici-repentis Pt-1C-BFP] gi|187976775|gb|EDU43401.1| [Pyrenophora tritici-repentis Pt-1C-BFP]
MADSYDYGIDALLDTGDINFDFNDEDKGGPSLEDTLGAIEGPNNIVSPQVKVEPGIEKPDERPLATDQQYQTVNLQEVAAPTADERLAISVPTSAEIESAIANELNFNANGFALAQGSDNQFIDDSQNGFEWSYQPAQGEQPLNSQVYYDSTTADMPVSNNWSNGMSNGMPNGMSNGMPNGMQNGMQNGMQNGMQNGMSNHMLNPVAHGQPMQSVHQMQHPAQPYYNPNRYGTAHPSPPELMPVVTHHELLDVPPRHDPRVMAPGQYHVNSHGTLSVSRVGLNSRGPPTADPDSDDDGFVPRPNRLKFDHGKEPLAKGKIPRSVNRQENARDEALKYYGSAPPSPRSWGPKGPDGNHIFTYTQYGELAPAKVFTKREMRIYLLGPSDKERDGFDMPEILPGVRKNRNKIRQGLTLWIGEPAAQANQRFPRQGHSTKCRYADCEYQARTIRPGNFIVVFDERQNEDGETIDPYHNAGYAHLWCIEKCLDLVKLWKHVDIRLDYRTFVREEYSPFKINSQGMGSEKVKNEWWQRNCYAVRPRGHKRTYKDSLTNALTEYKNAHRTSGQKKAQERRKGVDASKHHNDPELIRRLKEEAALKKKANANERKEKKQVRRNSMKSQLSEPDSDAESGVDYVVEREHERQLDRQLQPSVEPRVEPRVEPRVEPRAIIDPNIDPRLSNLPISPPATPPVSPPVTSNAPADVNTKYVDVGVQFPSPPRSLTPTPRRTPSPTPLKRRHDDDDDDDEEDSRPIKREKMDSDSESMDEEEELEAYFMNAKGGSPMSRSPSRGSSKYPSPKSSPRSPPRHVNVKRESKEIKW

SEQ ID NO: 39929 - DNA, 1889 bp, Muscodor strobelii
  misc_feature: SGI EST ID NO. CUFF.96454.2
  misc_feature: Variant of the nucleotide sequence at SEQ ID NO 39927
atttgatcatggtaaagagccactggcaaagggtaagatccctcgctccgtcaacagacaggagaatgcgcgtgatgaagccttgaagtactacggctcagcgccaccgtctcccaggagttggggcccaaaaggcccagatggcaatcatatcttcacctatacccaatacggagaactcgctcctgcaaaggtcttcacgaagcgggaaatgagaatctatttgctaggaccaagcgataaagaacgcgatggttttgatatgcctgagatattgccgggcgtcaggaagaaccggaacaaaatacgacaaggcctcacgctttggatcggagagcctgccgctcaggcaaaccaacgattcccacgtcaaggtcatagtaccaaatgtcggtacgcggattgtgagtatcaagcgcgtacgattagacctgggaatttcatcgttgtctttgacgagcgacaaaatgaggatggggagactatcgacccatatcacaacgccggatatgcccacctttggtgcatagagaagtgtctcgacttggtgaaactatggaagcacgtagatattcggctcgactatcgaacgttcgttcgagaggaatactctccattcaagattaactctcaagggatgggaagcgaaaaggtcaagaatgaatggtggcaacgaaactgttatgcggtgagaccgcggggccacaagaggacttacaaggattcgcttacaaacgccctgacggaatataaaaacgcccataggacgtcagggcaaaagaaagcacaagaaagaagaaagggtgtcgacgcttctaagcatcacaatgacccggaattgatcagacgtctcaaggaagaagcagctctcaagaagaaggcaaatgcgaatgagaggaaagaaaagaaacaggtaaggagaaatagcatgaagtcgcaactctcggaaccagattctgacgccgagtctggagttgattatgtggttgagcgtgaacatgagcgccaacttgatcgccaacttcagcccagcgttgagcccagagttgagcccagagttgagcccagagttgagcctcgagccatcatcgaccccaacatcgatcccagactctcgaatcttcccatcagtcccccggcaactcctccttttccctctccgccgcgttctctcactcctactcctcgccgcactccttccccaactcctctcaagcgccgtcatgacgatgatgacgacgacgatgaggaggactcgcgtcctataaagcgcgaaaagatggattctgactcagagtccatggatgaggaggaggagctcgaggcttacttcatgaacgcaaagggtggttcgccaatgagtagaagtcctagcaggggcagcagtaagtatccgtctcccaagtcttctcctagatctccaccacgacacgtcaatgtcaaacgagagagcaaggagataaaatggtaagtctagtatatggtatggtaaaagaaacgaggtatgatgatgacgtaacgacggagaaaaggaggaagagaggaaaaaagctacgtgtttgacgccatcgtctcagccactccttgtttcacgatttttctttgtttgtagcccatgaatgtttctcgttctagtatatatatataccttatttatctacataaattcacaaaaagcattttgatgttctacgcaactttgaaccacactcttatttctctgtggccatatgaacattacgtattcgccctactgtgtccccaactcatcagcgcttgcactctgagactccatatgaatatacgtattgccgaaattatgcgaagtactggattctatatgattgagccgttctcttttactctccactcgataaacgggatttaaa

SEQ ID NO: 39930 - DNA, 5319 bp, Muscodor strobelii
  misc_feature: SGI cDNA ID NO. 573908
  misc_feature: Reduced expression when VOC is produced
  misc_feature: Encodes the peptide sequence at SEQ ID NO 39931
atggcccaattaagttcagaattacaagagaaactccacgagttagagaaagagttagaagagggcgatattacagaaaaaggatttcaaaagcgtcgaacccagctctttgcccagtatgagctgcccgcagccaccggccgtctaaggctacacactcccgacagcgacaccattgctccccccggcggtgaccatcgaggcgccgctctggccgccctgagctcagcaagtcccgaagatgcctccttctcccccagcgccatgcgctcccccgtcgactggacgcccccgtcctccgagaccccctctgcccctccaactcaccgctccgagactccaggcggcttgctgcggccaggcggccccgtagctgccgaataccgtcctaccttggccatgcgcgattctctcttcctcaacccgacggcaaactattcccagaccctgggttccgatccccccactcgctcgggcaccatggtgtctggcgactatgctttcaaccccgagcagcagtccgcatacccccagcagcagatgtctcagttcgacagtcggacggggactatgatggactcgcaggtctacttcgatgactttgccggccaacaaccgttcgaacagggcccggggaccgagtacggtggtgcccataggtattccaccggggatgccttctctcctaccgtagcagtagctcctccgatgctcacggccaacgatttgcctccactcgatgccctgcagtaccagctgcccttagaaccgcgagaagtgccatttgctatttatgaccctcacgacagcaacactcccatgtcaaatttcgacaatattgctgccgtgttgaggcacagaggtagggtcacggctaagttgccagcatactgggtgctggacagcaagggaaaagagatcatctcgataacatgggacaagctggcttcgcgggctgagaaagttgcccaagtcatccgagacaagagctcgctatacaggggtgatcgcgttgctctgatttaccgggactcggaaatcattgactttgctatagccttgctcggctgcttcattgctggcgtcgtggcagtgcctatcaacgacctccaagactacacgagactcaacttgatcctcacatccacacaggcacacttggccttgacaaccgataataacctgaaggctttccaacgagatattacaacgcagaagttgaactggccaaagggtgttgagtggtggaaaaccaatgagtttggaagctatcaccccaagaagaaagacgatgttcctccattatctgtgccagacctagcctatatcgagttctcaagggctcccacaggcgatctccgtggtgtagtgctcagccaccgcaccatcatgcaccaaatggcgtgcatgagcgccattgtatctgaggtgcctgcaggagacacatttagtagaactctccgggacaagaacggccggctgattggaggaggagccaacagtgaaatcttgctatcctacctcgatccgcgtcaaggtataggaatgattcttgctgttttgctgaacgtgtaccgcgggcacacgactgtctgggtcgaaaaccgagctgtccatacccctggtctctatgcacacctcatcacgaaatataaagcgacactgatggcggcagattatcccggtctcaaagcggcagcattcaactatcagtcagatccaatgaccactcgaaatttcaaaaagggcatggagccgaatttccagcatgtgaagctatgtctaattgacactttgaccgttgacagcgaattccacgaggtattggccgatcgttggctacggccactacgaaacccgcgagccagacaggtcgttgcgccgatgctgtgtcttcccgaacatggtggcatggtcatcagtacacgcgactggctcgggggcgaagagcggatggggtgccctttgaaattagagatagagacagataccgattcgaagcacgacaaggaagagaaggatgaagaaaaagaagagaagacaaccccatcgaacggatttgcaagtctcttgggtggcggtaccacgactaccgaagaaaaccctactaccaacgacttgagcgaagttttgctagatcgagaagcccttaagacgaatgaggtcatcgttgttgctatcggcgaggaggtcgcgaaaaaggcagcgacagagccgggaacagtccgagtaggcgcttttggctatcctattcctgatgccacattagcggttgtagatcccgagagtgggcttttggctatgtcacaaacggttggagaaatttgggttgattcaccatccttatctggtggtttctgggcattgcctaaacatactgagcagattttccatgcaagaccctacaaatttgagcccggagaacctacaccaacgcctgttgagcctgagtttttgaggactggcctccttggaaccgtccttgaaggcaagatatatgtgctgggtctgtacgaagatcgcattcgacagaaagttgaatgggttgagcacggccacgaaatagccgagcatcgctatttcttcgttcagcatatcgttgtcagcatcctgcgcaacctcagcaagcaagtctttgatgcttcagcatttgatgttttcgttaatgacgaacacttgccgatcgtggttttggagtctgcagcggcctcgactgctccagcaacgtccggtgctccgcctaggcagctggacaccgcgttactggactcattatcggagaaatgtatggatgtcctcttgcaagagcatcacttacgagtttattgcgttatgattacggcaccgaactcattacctcgagtgacaaagaacgggaggcgggagattggcaatatgctatgcagacgggaattcgatcttggaaatctcccctgtgtgcatgtcaaatttggcgttgaacatgctgttctcaatctgcctatcggcgttgatccaatcgggggaatctggtctgccgtggcctcgaactcgagggtcgatatccttggccttgttgacaaacagtactcgggaatcgatagacgagaagtcgttatcgatgatcgcacctccacacccctgaacaatttctcgagtatttcggatcttatacaatggcgagtcgcgcgccagcctgaagaactcgcgctttgcagcatcgacgggaagggcaaagaaggaaagggcatcacttggaagaaattcgacaccaaagtcgcggcagtcgctgtctatctccgcaataaagcgaaaatacgaccgcgcgatcacgtaatgctcatgtacacgcactctgaagacttcatatttgctgtgcatgcatgcatcagccttggcgcagtggtaattcctaccgcgcccatggatgagcgccgcttaaatgaagatgtaccggcgtttctccatcttgtcaacgactacaatatcaagtgtgttctggtcaatagtgaggttgatcacctcttgaagcagaaaactgtatcacagcatatcaagcagtcggctcaagtcctcaagattggaataccctctatgttcaatacatcgaaaccccctaagcaaaacagtggactgcgagatctcggtatcaaaatagatccagcctgggtgcaaccaggttacccagtcatcgtttgggcatactggacgccagaccaacgccggatctctgttcagcttggacacgacactattttgggcatgtgcaaggtgcaaaaagaaacctgccagatgacgagttcacggcctgtgctcggttgcgttaggagtagcactggtttaggcttcattcactcctgtctcatgggcatctacataggcacggcaacctacctcctctctcctgttgaatacgcacaaaatcccatctctttgtttttgactcttagcagatacaagatcaaagacacctacgctactcctcaaatgcttgaccacgcaatgaattcgatgcctgggaaggggtttaccctacatgagctgaaaaacatgatgattaccgcggaaagcagacctcgggtggatgtatttcaaaaagtacgactgcactttgctggcacgggcttggacagaacggcgatcaacactgtgtactcgcatgtgctcaatcccatgattgcgtcacgatcttacatgtgtatagaacccattgagctgtggcttgatcaaagggccttacgcaggggacttgtcattccggtagacccagacgcagatccgaaggcgcttcttgttcaagattccggcatggtcccggtatcaacgcagattgctattgttaacccggagagccgtttgctctgtacagacggcgaatttggagagatttgggtcgattcggaagcatgtgtcaagggtttctacggctctaaagacccatttgacgcagaacgatttgatgggcgtactattgatggcgatccgaacatcagctatgtgagaaccggtgacctgggctttttgcatagcgtcagtcggccaattggacctggtggagctcaggtcgacatgcaggtattattcgttcttggaaacatcggggagacctttgagatcaacggtctcaaccatttccccatggatattgaagcctccgttgagagatgccaccgtaacattgtggctagcgggtgtgctgtattccaagctggcggacttgtggtagtacttgtcgaagtatcacgaaaggcatatctggcatctgtcgtcccggtcatcgtaaacactattctgaacgaacatcaaatcgtcgccgatattgtcgcatttgtaaataagggcgatttcccacgcagccgactaggcgaaaagcaacgcggtaagatattggcaggctgggtcactcgcaagatgcggacaatagcgcaatttgcaatccgggatgcaaacgcggacggcctcgacgacaccgacggaaccggacagaatcaccgcgctagcgtcggaagcattaggagcaacaacatccccggcgccagctcattacgcaacatggagcatgcaccgcagatcctcgagcaggaagagctcgatcaccagatggacaagttatcggcccttccaccgccctccgagagagctgccatgggcggacaccctatggatcctatgggtcccggtgatgctgggagttatgatgattatggtgaacatttacaaccgacggcacagcatgacgctcctctcatcaggctgccgagtgaaccgcagagggcggcggacgacgatgagtggcagcgtgatgctatcatgcatatgaacctcgcgggccagagctag

SEQ ID NO: 39931 - protein, 1772 aa, Muscodor strobelii
  misc_feature: SGI Peptide ID NO. 573908
  misc_feature (311)..(443): Pfam Id: PF00501 Pfam Desc: AMP-binding enzyme
  misc_feature (1078)..(1131): Pfam Id: PF00501 Pfam Desc: AMP-binding enzyme
  misc_feature (736)..(836): Pfam Id: PF00501 Pfam Desc: AMP-binding enzyme
  misc_feature (7)..(57): Pfam Id: PF06464 Pfam Desc: DMAP1-binding Domain
  misc_feature (1)..(1692): NCBI GI: 116208216 Blast Desc: CHGG_03401 [Chaetomium globosum CBS 148.51] gi|88183998|gb|EAQ91466.1| CHGG_03401 [Chaetomium globosum CBS 148.51]
  misc_feature (1)..(1769): NCBI GI: 145604479 Blast Desc: MGG_07705 [Magnaporthe grisea 70-15] gi|145012472|gb|EDJ97126.1| MGG_07705 [Magnaporthe grisea 70-15]
  misc_feature (1)..(1693): NCBI GI: 154309730 Blast Desc: BC1G_07335 [Botryotinia fuckeliana B05.10] gi|150851796|gb|EDN26989.1| BC1G_07335 [Botryotinia fuckeliana B05.10]
  misc_feature (1)..(1693): NCBI GI: 164428968 Blast Desc: NCU00239 [Neurospora crassa OR74A] gi|157072357|gb|EAA28474.2| conserved [Neurospora crassa OR74A]
  misc_feature (1)..(1691): NCBI GI: 171685580 Blast Desc: protein product [Podospora anserina] gi|170942751|emb|CAP68404.1| protein product [Podospora anserina]
  misc_feature (2)..(1769): NCBI GI: 261354113 Blast Desc: acyl-CoA ligase [Verticillium albo-atrum VaMs.102]
  misc_feature (161)..(1770): NCBI GI: 256732849 Blast Desc: [Nectria haematococca mpVI 77-13-4]
  misc_feature (143)..(1693): NCBI GI: 156052010 Blast Desc: SS1G_07413 [Sclerotinia sclerotiorum 1980] gi|154705190|gb|EDO04929.1| SS1G_07413 [Sclerotinia sclerotiorum 1980]
  misc_feature (161)..(1770): NCBI GI: 46124507 Blast Desc: FG06631.1 [Gibberella zeae PH-1]
  misc_feature (161)..(1770): NCBI GI: 30314340 Blast Desc: acyl CoA ligase-like protein [Gibberella zeae]
  misc_feature: Useful for introducing or modulating the production of volatile compounds
MAQLSSELQEKLHELEKELEEGDITEKGFQKRRTQLFAQYELPAATGRLRLHTPDSDTIAPPGGDHRGAALAALSSASPEDASFSPSAMRSPVDWTPPSSETPSAPPTHRSETPGGLLRPGGPVAAEYRPTLAMRDSLFLNPTANYSQTLGSDPPTRSGTMVSGDYAFNPEQQSAYPQQQMSQFDSRTGTMMDSQVYFDDFAGQQPFEQGPGTEYGGAHRYSTGDAFSPTVAVAPPMLTANDLPPLDALQYQLPLEPREVPFAIYDPHDSNTPMSNFDNIAAVLRHRGRVTAKLPAYWVLDSKGKEIISITWDKLASRAEKVAQVIRDKSSLYRGDRVALIYRDSEIIDFAIALLGCFIAGVVAVPINDLQDYTRLNLILTSTQAHLALTTDNNLKAFQRDITTQKLNWPKGVEWWKTNEFGSYHPKKKDDVPPLSVPDLAYIEFSRAPTGDLRGVVLSHRTIMHQMACMSAIVSEVPAGDTFSRTLRDKNGRLIGGGANSEILLSYLDPRQGIGMILAVLLNVYRGHTTVWVENRAVHTPGLYAHLITKYKATLMAADYPGLKAAAFNYQSDPMTTRNFKKGMEPNFQHVKLCLIDTLTVDSEFHEVLADRWLRPLRNPRARQVVAPMLCLPEHGGMVISTRDWLGGEERMGCPLKLEIETDTDSKHDKEEKDEEKEEKTTPSNGFASLLGGGTTTTEENPTTNDLSEVLLDREALKTNEVIVVAIGEEVAKKAATEPGTVRVGAFGYPIPDATLAVVDPESGLLAMSQTVGEIWVDSPSLSGGFWALPKHTEQIFHARPYKFEPGEPTPTPVEPEFLRTGLLGTVLEGKIYVLGLYEDRIRQKVEWVEHGHEIAEHRYFFVQHIVVSILRNLSKQVFDASAFDVFVNDEHLPIVVLESAAASTAPATSGAPPRQLDTALLDSLSEKCMDVLLQEHHLRVYCVMITAPNSLPRVTKNGRREIGNMLCRREFDLGNLPCVHVKFGVEHAVLNLPIGVDPIGGIWSAVASNSRVDILGLVDKQYSGIDRREVVIDDRTSTPLNNFSSISDLIQWRVARQPEELALCSIDGKGKEGKGITWKKFDTKVAAVAVYLRNKAKIRPRDHVMLMYTHSEDFIFAVHACISLGAVVIPTAPMDERRLNEDVPAFLHLVNDYNIKCVLVNSEVDHLLKQKTVSQHIKQSAQVLKIGIPSMFNTSKPPKQNSGLRDLGIKIDPAWVQPGYPVIVWAYWTPDQRRISVQLGHDTILGMCKVQKETCQMTSSRPVLGCVRSSTGLGFIHSCLMGIYIGTATYLLSPVEYAQNPISLFLTLSRYKIKDTYATPQMLDHAMNSMPGKGFTLHELKNMMITAESRPRVDVFQKVRLHFAGTGLDRTAINTVYSHVLNPMIASRSYMCIEPIELWLDQRALRRGLVIPVDPDADPKALLVQDSGMVPVSTQIAIVNPESRLLCTDGEFGEIWVDSEACVKGFYGSKDPFDAERFDGRTIDGDPNISYVRTGDLGFLHSVSRPIGPGGAQVDMQVLFVLGNIGETFEINGLNHFPMDIEASVERCHRNIVASGCAVFQAGGLVVVLVEVSRKAYLASVVPVIVNTILNEHQIVADIVAFVNKGDFPRSRLGEKQRGKILAGWVTRKMRTIAQFAIRDANADGLDDTDGTGQNHRASVGSIRSNNIPGASSLRNMEHAPQILEQEELDHQMDKLSALPPPSERAAMGGHPMDPMGPGDAGSYDDYGEHLQPTAQHDAPLIRLPSEPQRAADDDEWQRDAIMHMNLAGQS

SEQ ID NO: 39932 - DNA, 6155 bp, Muscodor strobelii
  misc_feature: SGI EST ID NO. CUFF.96679.1
  misc_feature: Variant of the nucleotide sequence at SEQ ID NO 39930
gcgaaacgtcaaaagcttgaaagcgggaaggcgacgtcgtcgacttgtgcgtgcgacttctcgaagtacttgtcgagatacctgtcaagacacttcgcaaaacacaacgatatagcggacattgaaggtgcattggcttttgaaggctcgctcgcactgcggaacacaccgacactctcagagaatctgtctttcccatctcgaacgtgtattgcaccttgtagtgtcatttctttcgtctcgctcttgctgtcacttagtcttgtatcttgccgcactgcatcgcatcacggtggccatgatacgctgctttgcgtcacattagcgacatcctcgcctgctgcgcgcgcatgctttatccttctcaaccatcgctattcggagtcacacgcggccatacatgacgatcgactgtcgaccgcgtcctcgatcgttacagcgccacgcataatcgcccacatcatctgcacacataggtacacatagactaccagcgtcgtcatggcccaattaagttcagaattacaagagaaactccacgagttagagaaagagttagaagagggcgatattacagaaaaaggatttcaaaagcgtcgaacccagctctttgcccagtatgagctgcccgcagccaccggccgtctaaggctacacactcccgacagcgacaccattgctccccccggcggtgaccatcgaggcgccgctctggccgccctgagctcagcaagtcccgaagatgcctccttctcccccagcgccatgcgctcccccgtcgactggacgcccccgtcctccgagaccccctctgcccctccaactcaccgctccgagactccaggcggcttgctgcggccaggcggccccgtagctgccgaataccgtcctaccttggccatgcgcgattctctcttcctcaacccgacggcaaactattcccagaccctgggttccgatccccccactcgctcgggcaccatggtgtctggcgactatgctttcaaccccgagcagcagtccgcatacccccagcagcagatgtctcagttcgacagtcggacggggactatgatggactcgcaggtctacttcgatgactttgccggccaacaaccgttcgaacagggcccggggaccgagtacggtggtgcccataggtattccaccggggatgccttctctcctaccgtagcagtagctcctccgatgctcacggccaacgatttgcctccactcgatgccctgcagtaccagctgcccttagaaccgcgagaagtgccatttgctatttatgaccctcacgacagcaacactcccatgtcaaatttcgacaatattgctgccgtgttgaggcacagaggtagggtcacggctaagttgccagcatactgggtgctggacagcaagggaaaagagatcatctcgataacatgggacaagctggcttcgcgggctgagaaagttgcccaagtcatccgagacaagagctcgctatacaggggtgatcgcgttgctctgatttaccgggactcggaaatcattgactttgctatagccttgctcggctgcttcattgctggcgtcgtggcagtgcctatcaacgacctccaagactacacgagactcaacttgatcctcacatccacacaggcacacttggccttgacaaccgataataacctgaaggctttccaacgagatattacaacgcagaagttgaactggccaaagggtgttgagtggtggaaaaccaatgagtttggaagctatcaccccaagaagaaagacgatgttcctccattatctgtgccagacctagcctatatcgagttctcaagggctcccacaggcgatctccgtggtgtagtgctcagccaccgcaccatcatgcaccaaatggcgtgcatgagcgccattgtatctgaggtgcctgcaggagacacatttagtagaactctccgggacaagaacggccggctgattggaggaggagccaacagtgaaatcttgctatcctacctcgatccgcgtcaaggtataggaatgattcttgctgttttgctgaacgtgtaccgcgggcacacgactgtctgggtcgaaaaccgagctgtccatacccctggtctctatgcacacctcatcacgaaatataaagcgacactgatggcggcagattatcccggtctcaaagcggcagcattcaactatcagtcagatccaatgaccactcgaaatttcaaaaagggcatggagccgaatttccagcatgtgaagctatgtctaattgacactttgaccgttgacagcgaattccacgaggtattggccgatcgttggctacggccactacgaaacccgcgagccagacaggtcgttgcgccgatgctgtgtcttcccgaacatggtggcatggtcatcagtacacgcgactggctcgggggcgaagagcggatggggtgccctttgaaattagagatagagacagataccgattcgaagcacgacaaggaagagaaggatgaagaaaaagaagagaagacaaccccatcgaacggatttgcaagtctcttgggtggcggtaccacgactaccgaagaaaaccctactaccaacgacttgagcgaagttttgctagatcgagaagcccttaagacgaatgaggtcatcgttgttgctatcggcgaggaggtcgcgaaaaaggcagcgacagagccgggaacagtccgagtaggcgcttttggctatcctattcctgatgccacattagcggttgtagatcccgagagtgggcttttggctatgtcacaaacggttggagaaatttgggttgattcaccatccttatctggtggtttctgggcattgcctaaacatactgagcagattttccatgcaagaccctacaaatttgagcccggagaacctacaccaacgcctgttgagcctgagtttttgaggactggcctccttggaaccgtccttgaaggcaagatatatgtgctgggtctgtacgaagatcgcattcgacagaaagttgaatgggttgagcacggccacgaaatagccgagcatcgctatttcttcgttcagcatatcgttgtcagcatcctgcgcaacctcagcaagcaagtctttgatgcttcagcatttgatgttttcgttaatgacgaacacttgccgatcgtggttttggagtctgcagcggcctcgactgctccagcaacgtccggtgctccgcctaggcagctggacaccgcgttactggactcattatcggagaaatgtatggatgtcctcttgcaagagcatcacttacgagtttattgcgttatgattacggcaccgaactcattacctcgagtgacaaagaacgggaggcgggagattggcaatatgctatgcagacgggaattcgatcttggaaatctcccctgtgtgcatgtcaaatttggcgttgaacatgctgttctcaatctgcctatcggcgttgatccaatcgggggaatctggtctgccgtggcctcgaactcgagggtcgatatccttggccttgttgacaaacagtactcgggaatcgatagacgagaagtcgttatcgatgatcgcacctccacacccctgaacaatttctcgagtatttcggatcttatacaatggcgagtcgcgcgccagcctgaagaactcgcgctttgcagcatcgacgggaagggcaaagaaggaaagggcatcacttggaagaaattcgacaccaaagtcgcggcagtcgctgtctatctccgcaataaagcgaaaatacgaccgcgcgatcacgtaatgctcatgtacacgcactctgaagacttcatatttgctgtgcatgcatgcatcagccttggcgcagtggtaattcctaccgcgcccatggatgagcgccgcttaaatgaagatgtaccggcgtttctccatcttgtcaacgactacaatatcaagtgtgttctggtcaatagtgaggttgatcacctcttgaagcagaaaactgtatcacagcatatcaagcagtcggctcaagtcctcaagattggaataccctctatgttcaatacatcgaaaccccctaagcaaaacagtggactgcgagatctcggtatcaaaatagatccagcctgggtgcaaccaggttacccagtcatcgtttgggcatactggacgccagaccaacgccggatctctgttcagcttggacacgacactattttgggcatgtgcaaggtgcaaaaagaaacctgccagatgacgagttcacggcctgtgctcggttgcgttaggagtagcactggtttaggcttcattcactcctgtctcatgggcatctacataggcacggcaacctacctcctctctcctgttgaatacgcacaaaatcccatctctttgtttttgactcttagcagatacaagatcaaagacacctacgctactcctcaaatgcttgaccacgcaatgaattcgatgcctgggaaggggtttaccctacatgagctgaaaaacatgatgattaccgcggaaagcagacctcgggtggatgtatttcaaaaagtacgactgcactttgctggcacgggcttggacagaacggcgatcaacactgtgtactcgcatgtgctcaatcccatgattgcgtcacgatcttacatgtgtatagaacccattgagctgtggcttgatcaaagggccttacgcaggggacttgtcattccggtagacccagacgcagatccgaaggcgcttcttgttcaagattccggcatggtcccggtatcaacgcagattgctattgttaacccggagagccgtttgctctgtacagacggcgaatttggagagatttgggtcgattcggaagcatgtgtcaagggtttctacggctctaaagacccatttgacgcagaacgatttgatgggcgtactattgatggcgatccgaacatcagctatgtgagaaccggtgacctgggctttttgcatagcgtcagtcggccaattggacctggtggagctcaggtcgacatgcaggtattattcgttcttggaaacatcggggagacctttgagatcaacggtctcaaccatttccccatggatattgaagcctccgttgagagatgccaccgtaacattgtggctagcgggtgtgctgtattccaagctggcggacttgtggtagtacttgtcgaagtatcacgaaaggcatatctggcatctgtcgtcccggtcatcgtaaacactattctgaacgaacatcaaatcgtcgccgatattgtcgcatttgtaaataagggcgatttcccacgcagccgactaggcgaaaagcaacgcggtaagatattggcaggctgggtcactcgcaagatgcggacaatagcgcaatttgcaatccgggatgcaaacgcggacggcctcgacgacaccgacggaaccggacagaatcaccgcgctagcgtcggaagcattaggagcaacaacatccccggcgccagctcattacgcaacatggagcatgcaccgcagatcctcgagcaggaagagctcgatcaccagatggacaagttatcggcccttccaccgccctccgagagagctgccatgggcggacaccctatggatcctatgggtcccggtgatgctgggagttatgatgattatggtgaacatttacaaccgacggcacagcatgacgctcctctcatcaggctgccgagtgaaccgcagagggcggcggacgacgatgagtggcagcgtgatgctatcatgcatatgaacctcgcgggccagagctagtgttgctggcggggcttggccgggtggctgcatgtgctcggcgttgggatttatttgcttgttttgtcattggctggtatcatttggctatagggtagtgactcctgatgaatatggatcgagcattgataggtaggaataggagacaggaagttgggggatgggggagggaggggtttgtagtgttatgatattatgatatcgtattgatcgttggaatgaaatgaaatgaagtaaaactacgatgtctacgcaaagttggttgttttgagatgctttgagcgggtcctttctgacttgttgatgtcgacattgttttatgggctgaaaaggag

SEQ ID NO: 39933 - DNA, 966 bp, Muscodor strobelii
  misc_feature: SGI cDNA ID NO. 573909
  misc_feature: Encodes the peptide sequence at SEQ ID NO 39934
atgcccgaccacaaccactactccatctacttgccccggcaccattaccacaacgacaacaccttgtgccacaacttcatctctggccactaccaccgcgattgcaagtacaacaatcgcgacctcaactaccagcactactaccacaacgtcgtatcctataataatctatcagcggcaactgatgttgatgccatgggctacaatgtgcttgacaagcgcctctgggccgtcgataacagcgctgtcacaccaaacttggtaaacatcgacggcactggtgcgatcacgattctcaaatcgcttcctgttcctcccggatatcccgacagtcgttatacaattggtgatgtcgacaacaccggcatcggctacttcgcagagagtcagagcttcacatacgctattgtcaaccttatacccgggtcttctgattttggccaagttacgaaagggacgttgagtacacctgcatatactatccttgactgggcatacgtcccaggcggcggtaacagtttatggggtcttggcaccaatgttggggtcaatgatcagacaaacctcatggagctttccagagacacgctcttgtgggaaacttcgaccagcttcggcaatatcgcaggcattaatagctggattgctgtttacgccggaccgaaccaaacgatatatgggcaagaagccacaagcggcgaaatttggttgtttccactaccagggtctcctattctgtcacctattccgataactctggttggattcggcataaaatcgctatacgactacaacctcagccacgactacggcttctaccatcactactcagtcatcgacaaccacgaccacggccttaataacagacacgacaaccaccacttcatctacgagttctataacaggttcgcctacgacgacaacttccagcacaacttcctcatcaacaaccgattcaccaactga

SEQ ID NO: 39934 - protein, 321 aa, Muscodor strobelii
  misc_feature: SGI Peptide ID NO. 573909
  misc_feature (151)..(240): NCBI GI: 46140247 Blast Desc: FG11638.1 [Gibberella zeae PH-1]
  misc_feature (111)..(251): NCBI GI: 46117462 Blast Desc: FG04573.1 [Gibberella zeae PH-1]
MPDHNHYSIYLPRHHYHNDNTLCHNFISGHYHRDCKYNNRDLNYQHYYHNVVSYNNLSAATDVDAMGYNVLDKRLWAVDNSAVTPNLVNIDGTGAITILKSLPVPPGYPDSRYTIGDVDNTGIGYFAESQSFTYAIVNLIPGSSDFGQVTKGTLSTPAYTILDWAYVPGGGNSLWGLGTNVGVNDQTNLMELSRDTLLWETSTSFGNIAGINSWIAVYAGPNQTIYGQEATSGEIWLFPLPGSPILSPIPITLVGFGIKSLYDYNLSHDYGFYHHYSVIDNHDHGLNNRHDNHHFIYEFYNRFAYDDNFQHNFLINNRFTN

SEQ ID NO: 39935 - DNA, 1158 bp, Muscodor strobelii
  misc_feature: SGI cDNA ID NO. 573910
  misc_feature: Elevated expression when VOC is produced
  misc_feature: Encodes the peptide sequence at SEQ ID NO 39936
atgtctcgactagcacttggtgacgcggacaagcaagctcgcgattggttcgcagaaaccacaacatcgctgggctgtgatatcaaagttgatagcatgggaaacatgtttgccgtgcggccaggtcgacaggatggcctggcgacttttgccgggtcacatctcgatacgcaacctactggaggaagatatgatggcatcctaggtatacaagcagggatcgagatgctacaagtattgaaagaaaatcatgtggaaactgagttccccgttggtgttgtaaactggacgaacgaagaaggcgctcgattccccatcagcatggtctcttccggtgtctggtcaggggatattgcagaggaaaaggcgcatgcactccgtgaagttagtggcacggcaacgatgcgctcagagctagagcgtatagggtacctaggcacgataccggcaagctacaagagcatcccattggcggcgcacttcgagctgcacattgaacagggcccggttttagaggcaacaaagcagaaagtcggcgtcgtcttcggtgtccaagcctatcgctggttcacagtaaccgtcgacggccgggacgcgcacacagggacgacaccccttgcgaatcgtggcgacgccatgttacttgccgcacgactcatcacacattcgcaccgcctcgccgcgaaacacgaagcgctcgcgtccactggcattctgacgctcgagcccggtagtacgaatactatacctggccgtgtcaatttctcgctggatatacgcgcacctgcggatgaaacggttgatgctctcgaggcagatctgaagcgcgatttcgcccgccttgctgcgggcgaaaatattggaggcttattagatgggtctgtacccggtagcgaatctttacatgtatcctggcgtacagacagcaactcgcctgcgacgcgtttccatccgtcctgtatcgatgccgtcagggcatcagcggtggccgtaactggcgacgagggtcttgtccgcgatatgacaagcggtgcgggacatgacagcgtgtatgccagccgccgctgtcctacttctatgattttcgtaccttcgaaaaaaggcgtcagccataatccagaggaatatactgcgcctgaagattgtaagtactactag

SEQ ID NO: 39936 - protein, 385 aa, Muscodor strobelii
  misc_feature: SGI Peptide ID NO. 573910
  misc_feature (182)..(286): Pfam Id: PF07687 Pfam Desc: Peptidase dimerisation domain
  misc_feature (50)..(385): Pfam Id: PF01546 Pfam Desc: Peptidase family M20/M25/M40
  misc_feature (50)..(383): Pfam Id: PF01546 Pfam Desc: Peptidase family M20/M25/M40
  misc_feature (1)..(382): NCBI GI: 256728007 Blast Desc: NECHADRAFT_95263 [Nectria haematococca mpVI 77-13-4]
  misc_feature (1)..(382): NCBI GI: 189198716 Blast Desc: N-carbamoyl-L-amino acid hydrolase [Pyrenophora tritici-repentis Pt-1C-BFP] gi|187982794|gb|EDU48282.1| N-carbamoyl-L-amino acid hydrolase [Pyrenophora tritici-repentis
  misc_feature (1)..(382): NCBI GI: 169609318 Blast Desc: SNOG_07748 [Phaeosphaeria nodorum SN15] gi|111064094|gb|EAT85214.1| SNOG_07748 [Phaeosphaeria nodorum SN15]
  misc_feature (1)..(375): NCBI GI: 46130816 Blast Desc: FG08963.1 [Gibberella zeae PH-1]
  misc_feature (1)..(382): NCBI GI: 145602292 Blast Desc: MGG_05024 [Magnaporthe grisea 70-15] gi|145010730|gb|EDJ95386.1| MGG_05024 [Magnaporthe grisea 70-15]
  misc_feature (1)..(382): NCBI GI: 119194651 Blast Desc: CIMG_01700 [Coccidioides immitis RS]
  misc_feature (1)..(382): NCBI GI: 240105218 Blast Desc: amidase, hydantoinase/carbamoylase family protein [Coccidioides posadasii C735 delta SOWgp]
  misc_feature (1)..(382): NCBI GI: 67526499 Blast Desc: AN3707.2 [Aspergillus nidulans FGSC A4] gi|40740725|gb|EAA59915.1| AN3707.2 [Aspergillus nidulans FGSC A4] gi|259481751|tpe|CBF75566.1| TPA: beta-alanine synthase, FGSC
  misc_feature (1)..(382): NCBI GI: 238840726 Blast Desc: N-carbamoyl-L-amino acid hydrolase [Microsporum canis CBS 113480]
  misc_feature (1)..(382): NCBI GI: 119472752 Blast Desc: beta-alanine synthase, [Neosartorya fischeri NRRL 181] gi|119406561|gb|EAW16512.1| beta-alanine synthase, [Neosartorya fischeri NRRL 181]
  misc_feature (1)..(382): SWISSPROT Homolog: EC 3.5.1.87 N-carbamoyl-L-amino-acid hydrolase
  misc_feature: Useful for introducing or modulating the production of volatile compounds
MSRLALGDADKQARDWFAETTTSLGCDIKVDSMGNMFAVRPGRQDGLATFAGSHLDTQPTGGRYDGILGIQAGIEMLQVLKENHVETEFPVGVVNWTNEEGARFPISMVSSGVWSGDIAEEKAHALREVSGTATMRSELERIGYLGTIPASYKSIPLAAHFELHIEQGPVLEATKQKVGVVFGVQAYRWFTVTVDGRDAHTGTTPLANRGDAMLLAARLITHSHRLAAKHEALASTGILTLEPGSTNTIPGRVNFSLDIRAPADETVDALEADLKRDFARLAAGENIGGLLDGSVPGSESLHVSWRTDSNSPATRFHPSCIDAVRASAVAVTGDEGLVRDMTSGAGHDSVYASRRCPTSMIFVPSKKGVSHNPEEYTAPEDCKYY

SEQ ID NO: 39937 - DNA, 2243 bp, Muscodor strobelii
  misc_feature: SGI EST ID NO. CUFF.96525.1
  misc_feature: Variant of the nucleotide sequence at SEQ ID NO 39935
ctcgggattagcagtagtatctccatgtgacgcctgtgttgggtcttcttgaatcactctgtagagatgcgtctggtattgtctctgatggtgcagtagcgagaggaaacatttgagatactttgtctggtgattgaaagaagcatttaagatctaacactctgtagttacacacatacgctggttgtggggttagataataaggttagtttttttgggctgcataccaagccaattcgatggggtgttcgtcccactacatctccaacaactcgagataaggcccatccacttcgatacatatcgccccgtgatctctcaacccgcacgctgacccatcaggcatagagatcctcagggagttcacaatgtcgttcacttttcacaggccaccctctgtggccttcatcacaaagtcggtccacagcttgtctgcctgccaaggactgcgggggtggcaggcatacagtaggaggggtctagctacacccgcgaacaaacttcacacaaccgatattgaatcattgagagccaaccaagggagactcatggagactttgcacaagacatgcgaatgggggacgggaaaacgatggggaagccagcccaccgagacaggtatgtctcgactagcacttggtgacgcggacaagcaagctcgcgattggttcgcagaaaccacaacatcgctgggctgtgatatcaaagttgatagcatgggaaacatgtttgccgtgcggccaggtcgacaggatggcctggcgacttttgccgggtcacatctcgatacgcaacctactggaggaagatatgatggcatcctaggtatacaagcagggatcgagatgctacaagtattgaaagaaaatcatgtggaaactgagttccccgttggtgttgtaaactggacgaacgaagaaggcgctcgattccccatcagcatggtctcttccggtgtctggtcaggggatattgcagaggaaaaggcgcatgcactccgtgaagttagtggcacggcaacgatgcgctcagagctagagcgtatagggtacctaggcacgataccggcaagctacaagagcatcccattggcggcgcacttcgagctgcacattgaacagggcccggttttagaggcaacaaagcagaaagtcggcgtcgtcttcggtgtccaagcctatcgctggttcacagtaaccgtcgacggccgggacgcgcacacagggacgacaccccttgcgaatcgtggcgacgccatgttacttgccgcacgactcatcacacattcgcaccgcctcgccgcgaaacacgaagcgctcgcgtccactggcattctgacgctcgagcccggtagtacgaatactatacctggccgtgtcaatttctcgctggatatacgcgcacctgcggatgaaacggttgatgctctcgaggcagatctgaagcgcgatttcgcccgccttgctgcgggcgaaaatattggaggcttattagatgggtctgtacccggtagcgaatctttacatgtatcctggcgtacagacagcaactcgcctgcgacgcgtttccatccgtcctgtatcgatgccgtcagggcatcagcggtggccgtaactggcgacgagggtcttgtccgcgatatgacaagcggtgcgggacatgacagcgtgtatgccagccgccgctgtcctacttctatgattttcgtaccttcgaaaaaaggcgtcagccataatccagaggaatatactgcgcctgaagattgtaagtactactagactgtcagattttgttcacaaacgacacgctagtatcaatatcccgtgctatgtatggtaagaggaaatgaaaaggaatgaatactaatgcagaaccctaccgtctaataggcgcaatcggagcagcggtcctcatgcaaagcgttctgcgcttcgatcgagcgcgtgcttccggctgaagcgtgttgactgattgagagaatgttaacagggatcgattacttcctctcttcgcacaagcgtccaatattggcaatgtgaaaattctatcgtgagtatcaaagtaagcaaatttcgggcattccgatgcttggagctccaatccatacaagtacaagaaagctagctgcctttcgaatatatttattaggattttattttgttgaagctaatcagacctggagggagagcctcaacccaaaacacggcgaaacagtcgaatatagagatgaaaatacctccgtg

SEQ ID NO: 39938 - DNA, 483 bp, Muscodor strobelii
  misc_feature: SGI cDNA ID NO. 573911
  misc_feature: Elevated expression when VOC is produced
  misc_feature: Encodes the peptide sequence at SEQ ID NO 39939
atggcgacagaagaatcactccgcaacactgcggaagcctttttaagcgcattcaatacgcttgacgctaaggtcgagatccgcgccgcagactgcacccacaactttgctccatcatctctcggcatgccgacgggcatgagaaatgacgtctgggagaatcatgtgaaacgcctccgtcaggtcatgagcggctttcccgttaccgccaaagagatccacatcaacgtcgcaaaaggtcaggttatcatctgggcgactgccgtcccagtttttcgcgaggaggctaaggacccgaaggctagcgatgatgccgagtggtcagcgtggactggcgagtacatgtttctcttggatatagatggagagggcaagattagtcgcattgtggaattcctggatagtctggcgacgagtaatgcgcggactttgctggataaagcttttgcaaatgttgaagccgcggggaagtcatttccatag

SEQ ID NO: 39939 - protein, 160 aa, Muscodor strobelii
  misc_feature: SGI Peptide ID NO. 573911
  misc_feature (3)..(156): NCBI GI: 169621522 Blast Desc: SNOG_13971 [Phaeosphaeria nodorum SN15] gi|160704275|gb|EAT78596.2| SNOG_13971 [Phaeosphaeria nodorum SN15]
  misc_feature (1)..(151): NCBI GI: 240273370 Blast Desc: conserved [Ajellomyces capsulatus H143]
  misc_feature (1)..(135): NCBI GI: 225558131 Blast Desc: [Ajellomyces capsulatus G186AR]
  misc_feature (10)..(135): NCBI GI: 239615633 Blast Desc: [Ajellomyces dermatitidis ER-3]
  misc_feature: Useful for introducing or modulating the production of volatile compounds
MATEESLRNTAEAFLSAFNTLDAKVEIRAADCTHNFAPSSLGMPTGMRNDVWENHVKRLRQVMSGFPVTAKEIHINVAKGQVIIWATAVPVFREEAKDPKASDDAEWSAWTGEYMFLLDIDGEGKISRIVEFLDSLATSNARTLLDKAFANVEAAGKSFP

SEQ ID NO: 39940 - DNA, 967 bp, Muscodor strobelii
  misc_feature: SGI EST ID NO. CUFF.96479.0
  misc_feature: Variant of the nucleotide sequence at SEQ ID NO 39938
ttcaacgatgcttgacaatagcacgatgtattatcagaagcttctatataagagggacgtgaaactcgaaacatcgatatctcttcaaacgaatcatccggcctcaagcttctaacgtccttgagttacgttcaacaaagtaaaattggccaaaggtcaagagccacttgataaataaaaaatggcgacagaagaatcactccgcaacactgcggaagcctttttaagcgcattcaatacgcttgacgctaaggtcgagatccgcgccgcagactgcacccacaactttgctccatcatctctcggcatgccgacgggcatgagaaatgacgtctgggagaatcatgtgaaacgcctccgtcaggtcatgagcggctttcccgttaccgccaaagagatccacatcaacgtcgcaaaaggtcaggttatcatctgggcgactgccgtcccagtttttcgcgaggaggctaaggacccgaaggctagcgatgatgccgagtggtcagcgtggactggcgagtacatgtttctcttggatatagatggagagggcaagattagtcgcattgtggaattcctggatagtctggcgacgagtaatgcgcggactttgctggataaagcttttgcaaatgttgaagccgcggggaagtcatttccataggacccttaggaatggagaaaccatctgcttccacaagttaggtagtctctggttaactctataaagacaagtattcaagtgctttgatatttgtcgtattttgtattgaataatatccgtactcatcggatctcacgaggtagttttgaagaaagctgtgcatcgactctaattgttgcatcgcagttatgtctaatgcttgggacattgtggcttcatcaggccaacccccatgatccaccaacaatcggaataaggattcgttctctcgatctatcgcaataagaaacgccaactgcacca

SEQ ID NO: 39941 - DNA, 1437 bp, Muscodor strobelii
  misc_feature: SGI cDNA ID NO. 573912
  misc_feature: Encodes the peptide sequence at SEQ ID NO 39942
atgtcgtactcacagattccaaacgaaattctagactgcatactttacttcgctgtaaaagtccgtagccgtaaaagagccgcccgtctacgtcttgtgaaccgcaggtggaataatgctgttgaggaagcgatgtttaaatcacgcattcccatcactaacggaccattcgtgtcacgatatctcactttgatggctcttcaacaagatacgcagtcaaccagtcactttgcaacgatattcgatgttgccaaggccgttgtcgaggctcgggatccagatgcagatgactgggaagccagcaaatcagtgaaagaccttgtttacgaaatgatgcacgttcttatcacgctattgggcaaaagattttcaatcaaagctcccaaacctcataaaaaatatgctcaaggcggatttaaacacgcccttatctccctagtggcatggaaaggagatctcgatttgcttcatattcttctgcgacagaattctaacatggaaatgactgaacgtaataccatggattcttcgaggttggaattctctgccccgggtatctgcagcctggatttcttccctgatccttacgcaatcgcagcgtactttggaaacacggcgattatttcgttgctgctgcaccatgattctcgttccgcgtccgaaattcaagattcgcgtggcagcatcattgtttgggcaatggcaggaaaccagaaagatgtgctggatctcgttttagatccaacttttaacgccgaaagtcccgatttcgtgaaatggaggtcaataatagttgccggcctacgccaaactaccagcgtcgatgtcttcaaaaggtgcttcgagttggtggagggtcgccatctccaacaccctgatagacccgtgagcatggggtaccaagaaagatggctgcacgaacgattgctccatgtagccaaggacgggtcggtcgcgctgatggaatatctgcaccagaatggtgccccgattgaccgatactcaccggatcacgatgctgatgacattcatcctattcaacaagctgcaatccatgggcatacagacgctgtgaagtggttgctggacaaaggtgcgcttatagcgtgctcactgcctgctgcggtgatctctggttcagagaggacagtacagctgctcattgagcacaatgccttagacgataccgagatggtgcagttggcgtttcttattgcgatagatcgagagaacgaatccttattccgattgttggtggatcatgggggttggcctgatgaagccacaatgtcccaagcattagacataactgcgatgcaacaattagagtcgatgcacagctttcttcaaaactacctcgtgagatccgatgagtacggatattattcaatacaaaatacgacaaatatcaaagcacttgaatacttgtctttatag

SEQ ID NO: 39942 - protein, 478 aa, Muscodor strobelii
  misc_feature: SGI Peptide ID NO. 573912
  misc_feature (14)..(449): NCBI GI: 169594874 Blast Desc: SNOG_00167 [Phaeosphaeria nodorum SN15] gi|111070542|gb|EAT91662.1| SNOG_00167 [Phaeosphaeria nodorum SN15]
  misc_feature (139)..(454): NCBI GI: 189199064 Blast Desc: conserved [Pyrenophora tritici-repentis Pt-1C-BFP] gi|187982968|gb|EDU48456.1| conserved [Pyrenophora tritici-repentis Pt-1C-BFP]
  misc_feature (135)..(451): NCBI GI: 39963365 Blast Desc: [Magnaporthe grisea 70-15] gi|145015481|gb|EDK00018.1| [Magnaporthe grisea 70-15]
  misc_feature (146)..(395): NCBI GI: 227536978 Blast Desc: ankyrin [Sphingobacterium spiritivorum ATCC 33300] gi|227243174|gb|EEI93189.1| ankyrin [Sphingobacterium spiritivorum ATCC 33300]
  misc_feature (146)..(395): NCBI GI: 241893492 Blast Desc: ankyrin [Sphingobacterium spiritivorum ATCC 33861] gi|241866741|gb|EER70492.1| ankyrin [Sphingobacterium spiritivorum ATCC 33861]
  misc_feature (179)..(426): NCBI GI: 259488555 Blast Desc: TPA: conserved [Aspergillus nidulans FGSC A4]
  misc_feature (179)..(426): NCBI GI: 67517919 Blast Desc: AN1130.2 [Aspergillus nidulans FGSC A4] gi|40747092|gb|EAA66248.1| AN1130.2 [Aspergillus nidulans FGSC A4]
  misc_feature (138)..(422): NCBI GI: 238485594 Blast Desc: ankyrin repeat-containing protein, [Aspergillus flavus NRRL3357] gi|220698914|gb|EED55253.1| ankyrin repeat-containing protein, [Aspergillus flavus NRRL3357]
  misc_feature (349)..(450): NCBI GI: 169606134 Blast Desc: SNOG_06101 [Phaeosphaeria nodorum SN15] gi|111064812|gb|EAT85932.1| SNOG_06101 [Phaeosphaeria nodorum SN15]
  misc_feature (6)..(454): NCBI GI: 39943912 Blast Desc: [Magnaporthe grisea 70-15] gi|145014680|gb|EDJ99248.1| [Magnaporthe grisea 70-15]
MSYSQIPNEILDCILYFAVKVRSRKRAARLRLVNRRWNNAVEEAMFKSRIPITNGPFVSRYLTLMALQQDTQSTSHFATIFDVAKAVVEARDPDADDWEASKSVKDLVYEMMHVLITLLGKRFSIKAPKPHKKYAQGGFKHALISLVAWKGDLDLLHILLRQNSNMEMTERNTMDSSRLEFSAPGICSLDFFPDPYAIAAYFGNTAIISLLLHHDSRSASEIQDSRGSIIVWAMAGNQKDVLDLVLDPTFNAESPDFVKWRSIIVAGLRQTTSVDVFKRCFELVEGRHLQHPDRPVSMGYQERWLHERLLHVAKDGSVALMEYLHQNGAPIDRYSPDHDADDIHPIQQAAIHGHTDAVKWLLDKGALIACSLPAAVISGSERTVQLLIEHNALDDTEMVQLAFLIAIDRENESLFRLLVDHGGWPDEATMSQALDITAMQQLESMHSFLQNYLVRSDEYGYYSIQNTTNIKALEYLSL

SEQ ID NO: 39943 - DNA, 345 bp, Muscodor strobelii
  misc_feature: SGI EST ID NO. CUFF.96485.0
  misc_feature: Variant of the nucleotide sequence at SEQ ID NO 39941
ccggcccagcatgtcgtactcacagattccaaacgaaattctagactgcatactttacttcgctgtaaaagtccgtagccgtaaaagagccgcccgtctacgtcttgtgaaccgcaggtggaataatgctgttgaggaagcgatgtttaaatcacgcattcccatcactaacggaccattcgtgtcacgatatctcactttgatggctcttcaacaagatacgcagtcaaccagtcactttgcaacgatattcgatgttgccaaggccgttgtcgaggctcgggatccagatgcagatgactgggaagccagcaaatcagtgaaagaccttgtttacgaaatgat

SEQ ID NO: 39944 - DNA, 3522 bp, Muscodor strobelii
  misc_feature: SGI cDNA ID NO. 573913
  misc_feature: Encodes the peptide sequence at SEQ ID NO 39945
atgcttaaaagatgctcgcctatatgggcacttctctgcctgggagtatatcttgatgagatcaccgctagcccaaccggatcggttgcgcgcagacaagatgtcacaagcacggctacgaaagcttcgtcaatagcgacagccgcggaaaaggagaaagagacttcggcttccactcatacagacgaatctccctcgacgaaaactcatacctctcgcgcaacgactacggtagaaattaggacgtcttcgtcaactccattcccttccgctattaatgataataatcctcccaacagtagctccatcgaaccgatgactactgttcaagcgggacatttaccattgcaaccagaactgacacccggttggggagttgccggcgcgatccttttgattacaggagccctgtacggtctcgttggaatcaagaacgaatgggtacacacttttctttcttcggcctttttatctgcattaagcattacagttttgatcgtatacatcatgaatccaccaatctcaaatcctatacaaggggcatacgttgttgctgccgttgtccctggcttaatactcggcggactggcgatcgtatttcgggagattaccgagggctttggatgtatacttggcggcttctgcttgtccatgtggtttcttacactcaaatcaggcggtctactcccatcgtcgactggcaagatattactcatcactatcctcacagttactagctatgtattgtactttatacgaaaattgcgagcatatgcactattaatctcaatggcattcgctggtgcgacggcaacagttttggggatcgattgtttcagcaaagctgggctgaaagaattttgggcatacatctggaatttgaacaacgggaaaatatttccttatggcaccaacacgtatccaatgacaaggggcattcgtgttgagatcgccgtggtcgctgttctcacgattgtgggcgtcatatcgcaattaaaactctggcgtgtcatccaacagcaccgagatcgtaaagctgaggagcaggccgaggaacggcgaaagcgtgacgaagaagaggcaaaagttgggcaacagattgaagctgaagcccaaagagagcgaaaagtgtgggagaatgtctacggcgatcagacgaccaacggactcgcagcacctggtgactcggatccggagaatgagaaaaaggggcatcccatccacaccaatgtcagccgcgtttctctcgaggaggatgggatcgagatgattgaccttcctgcatcggttggtgtgggctctcccaatctgttgaaggaaacagatgaaaccacaatcaaccaaacacccgtgaaagatgtcggtttaattgaaaacctaaagacggaagcccttcccgagccagaagaaaaagtatggattgtcagcagctcgggtgaagctcggccactttcgtcatcatctcgcccagactcgaaccgattttcagggtctgaatcaccacaaatcattcctctcccattcgcaatacccgatggcccacacgagacagataacaggtcctcatttgcaacttatgccgatgaagacgatcgatcgatcatgctcagtaagagaggcttaagaatgtcattgacgaaccgattatcggtcaactctgcaaatatactacgaagtctgtcgcaaaggtcgggcggctcgcatacatctaagcggaaatcgattgaatcctcacagcctttgcagaatctaaatcaaacaagcagcaccgaagagttagtactcgacagttcgcgtcgttctctcgatgcggcatcatcggttgcagctaccgtcgacggcacaagtattgacggtgagagcctcgcacgacccatgcgtggtggcggtgaacagaactatgtcttagagatggcaggagagatccgtcatggtcaagaggatcatgagatcaaatcgaatgagaagtctgaagacgtagcgaagttgaaatcgccagggcatagtccatatctcgatactcgaccttcagctactgccgagccagctggaacagacacgacgagttcccaaggcttggggcgaacctcgggtagtatatccaagcggagcagcacaaaccatgaaaagacagacggatccaatgggatcagcaacccaacagacatttcggcccctgaggatatgccgcaagtttccaaacgcggaacagcaatcacttcctcaagcgcccttatcttcaccgaaaacggtttacggtccgaattgtctcgcgtcgcagtatcatatcgaacgaatgaatgggccaagcatttaagccatgcagaagcaccagtcgaggataaagtggaaaccgaggaatcttctcacgatcctccaatgagaatagaaagtgaagtagctgcaccactcaagattgaggaactccagcagactcctgttcgcagcatatcatccacggctgtcgtacgaccgccatctgccacgtcaaatttgcaaccgcatcgttcaggatcccgaagttcaccttactcatctcatcttaaaactcaaatgtcgtcaacacttgcgatactgaccggcggtcagtcacattcgccgacgcaggagataagtccgtcaagggttgtacatcatagctttcgaagtaggggaccacgaagatcggactcgcatattcgaccaattttggaggagggcatcgatactgtgtctccctctcaccgactttcgtctgaaggcagcagcactcgtatgcaaaactcaactcccccttcgcctacaggctccaaggcaccaacgcccagatatgattggcctactcctggactccagtctcacacgagtccacagtcactcattgctcaacgggatatgctcttgcgtaacaaatctcaatcgcagcttcttacagcacaaatgattcaagaacagtcccaacaatttgcacgagccccgagccagatcgcctttaactctccatacatgacccttgatgccgacgatctacctctcagccagcgtagagagctcatgcgccaaaacagcatgctgtccattcattcaagtagtgcacggccaagaagaaatagcaccttgtccgccatcaacctcccagctgtcgagaccctaaccgcggaaaacactggtttcaactcacatcaaccacaacgagtctcaacagtgccatctcaatcagagcggaacgcgcgactagccaactttcgcatgtccgtagctgctgatctgcgtagtgggacaccattgggcagaaatggaggctatgacataccagcttcgctcatgcccgttcatgtggatgggcatatcgaaattgctcgatcgctcgaacaacaccacagcactatgttaaaccagaaagatcaagagacgcaacggcgagagagagctcgcttcgagaagcagcggaacgaccgaatcttcgaggagaagatgcaaagtggcgaactcgccgacgcgcaccgtgatgctctgcgtcgaatgcaaagcaacattaagtag

SEQ ID NO: 39945 - protein, 1173 aa, Muscodor strobelii
  misc_feature: SGI Peptide ID NO. 573913
  misc_feature (108)..(1173): NCBI GI: 256732782 Blast Desc: NECHADRAFT_100186 [Nectria haematococca mpVI 77-13-4]
  misc_feature (156)..(1173): NCBI GI: 261360136 Blast Desc: conserved [Verticillium albo-atrum VaMs.102]
  misc_feature (198)..(1173): NCBI GI: 145614378 Blast Desc: MGG_04838 [Magnaporthe grisea 70-15] gi|145021311|gb|EDK05440.1| MGG_04838 [Magnaporthe grisea 70-15]
  misc_feature (131)..(625): NCBI GI: 171686964 Blast Desc: protein product [Podospora anserina] gi|170943443|emb|CAP69096.1| protein product [Podospora anserina]
  misc_feature (108)..(429): NCBI GI: 212530728 Blast Desc: conserved [Penicillium marneffei ATCC 18224] gi|210074919|gb|EEA29006.1| conserved [Penicillium marneffei ATCC 18224]
  misc_feature (114)..(385): NCBI GI: 226294300 Blast Desc: conserved [Paracoccidioides brasiliensis Pb18]
  misc_feature (126)..(397): NCBI GI: 259484091 Blast Desc: TPA: [Aspergillus nidulans FGSC A4]
  misc_feature (114)..(384): NCBI GI: 189190238 Blast Desc: [Pyrenophora tritici-repentis Pt-1C-BFP] gi|187973064|gb|EDU40563.1| [Pyrenophora tritici-repentis Pt-1C-BFP]
  misc_feature (118)..(410): NCBI GI: 119479731 Blast Desc: NFIA_079380 [Neosartorya fischeri NRRL 181] gi|119408048|gb|EAW17997.1| NFIA_079380 [Neosartorya fischeri NRRL 181]
  misc_feature (62)..(395): NCBI GI: 146324109 Blast Desc: conserved [Aspergillus fumigatus Af293] gi|129558064|gb|EAL91807.2| conserved [Aspergillus fumigatus Af293]
MLKRCSPIWALLCLGVYLDEITASPTGSVARRQDVTSTATKASSIATAAEKEKETSASTHTDESPSTKTHTSRATTTVEIRTSSSTPFPSAINDNNPPNSSSIEPMTTVQAGHLPLQPELTPGWGVAGAILLITGALYGLVGIKNEWVHTFLSSAFLSALSITVLIVYIMNPPISNPIQGAYVVAAVVPGLILGGLAIVFREITEGFGCILGGFCLSMWFLTLKSGGLLPSSTGKILLITILTVTSYVLYFIRKLRAYALLISMAFAGATATVLGIDCFSKAGLKEFWAYIWNLNNGKIFPYGTNTYPMTRGIRVEIAVVAVLTIVGVISQLKLWRVIQQHRDRKAEEQAEERRKRDEEEAKVGQQIEAEAQRERKVWENVYGDQTTNGLAAPGDSDPENEKKGHPIHTNVSRVSLEEDGIEMIDLPASVGVGSPNLLKETDETTINQTPVKDVGLIENLKTEALPEPEEKVWIVSSSGEARPLSSSSRPDSNRFSGSESPQIIPLPFAIPDGPHETDNRSSFATYADEDDRSIMLSKRGLRMSLTNRLSVNSANILRSLSQRSGGSHTSKRKSIESSQPLQNLNQTSSTEELVLDSSRRSLDAASSVAATVDGTSIDGESLARPMRGGGEQNYVLEMAGEIRHGQEDHEIKSNEKSEDVAKLKSPGHSPYLDTRPSATAEPAGTDTTSSQGLGRTSGSISKRSSTNHEKTDGSNGISNPTDISAPEDMPQVSKRGTAITSSSALIFTENGLRSELSRVAVSYRTNEWAKHLSHAEAPVEDKVETEESSHDPPMRIESEVAAPLKIEELQQTPVRSISSTAVVRPPSATSNLQPHRSGSRSSPYSSHLKTQMSSTLAILTGGQSHSPTQEISPSRVVHHSFRSRGPRRSDSHIRPILEEGIDTVSPSHRLSSEGSSTRMQNSTPPSPTGSKAPTPRYDWPTPGLQSHTSPQSLIAQRDMLLRNKSQSQLLTAQMIQEQSQQFARAPSQIAFNSPYMTLDADDLPLSQRRELMRQNSMLSIHSSSARPRRNSTLSAINLPAVETLTAENTGFNSHQPQRVSTVPSQSERNARLANFRMSVAADLRSGTPLGRNGGYDIPASLMPVHVDGHIEIARSLEQHHSTMLNQKDQETQRRERARFEKQRNDRIFEEKMQSGELADAHRDALRRMQSNIK

SEQ ID NO: 39946 - DNA, 5726 bp, Muscodor strobelii
  misc_feature: SGI EST ID NO. CUFF.96489.0
  misc_feature: Variant of the nucleotide sequence at SEQ ID NO 39944
cacttaccagccgagccaagtcgcgcaattcctaccatgcgcgcgacgtcttctcgggagtccggcgagagagcaggtagatcttgctaacgctcttggtctcaaggccaatcgccccatccagacgtctctgttaatttcccgagacccaagtagtatctgaattgggccataacacgttcatccggctgagtgccagggcctggctgcccatcgctagacgaaacagaccaaacagtgaagaccagtgcaagaagtactcgttcgagtaacgtaagagatgggatcgactaagaagaagtctcttctcgccaagccacgccatagcttgatgtctgctagttggtacgcgcagctgcggtcgaaaaagcaaaatttcagacaggtctctccatgactgtgatccgagctttatgatcaaccacttactttctttccatgcagcttctacctaatatgtggccaacatacgagtagagctgtagtttgacctgagacctcgcacgctccttttacagcactagattcatgccgccctcttttgcatgaactgtgcacacactcattcgtttgttcccgtctgttctcgctcctattctgccctatagttaatacttgtaatgcaagagtactttgtcaatgatatctgtgtagtaatcgaacctttctgccgggtccttcgatatcttggactggtaacactacatccgataccacgcttctgattacgataccatctagaccgcttcaacggtgactcgacttccattgtcggcgggcgtcgttctttttcatcattactggttctcgtcctctacccgttgtcgactagtctagttcagaagttcaacactcccccgcgttgagactctggcacaagcttgtgaaagtcgcctatctcgagttaaggtttccctatcgtgcctggactcgacttccgattataccaccaggaacctggaaactcagcattgctctgtctttttagtccgcttcaattagagtaactgtgttgataatgcttttagctacaagcattcaatgtatcgagcattgagttttgttaggcaacgaagccgttaataccattcacgtccacctaattccagatcttgtgtcgtctcggtcctatttgtggtcacgccgacaggaagcacgatgcttaaaagatgctcgcctatatgggcacttctctgcctgggagtatatcttgatgagatcaccgctagcccaaccggatcggttgcgcgcagacaagatgtcacaagcacggctacgaaagcttcgtcaatagcgacagccgcggaaaaggagaaagagacttcggcttccactcatacagacgaatctccctcgacgaaaactcatacctctcgcgcaacgactacggtagaaattaggacgtcttcgtcaactccattcccttccgctattaatgataataatcctcccaacagtagctccatcgaaccgatgactactgttcaagcgggacatttaccattgcaaccagaactgacacccggttggggagttgccggcgcgatccttttgattacaggagccctgtacggtctcgttggaatcaagaacgaatgggtacacacttttctttcttcggcctttttatctgcattaagcattacagttttgatcgtatacatcatgaatccaccaatctcaaatcctatacaaggggcatacgttgttgctgccgttgtccctggcttaatactcggcggactggcgatcgtatttcgggagattaccgagggctttggatgtatacttggcggcttctgcttgtccatgtggtttcttacactcaaatcaggcggtctactcccatcgtcgactggcaagatattactcatcactatcctcacagttactagctatgtattgtactttatacgaaaattgcgagcatatgcactattaatctcaatggcattcgctggtgcgacggcaacagttttggggatcgattgtttcagcaaagctgggctgaaagaattttgggcatacatctggaatttgaacaacgggaaaatatttccttatggcaccaacacgtatccaatgacaaggggcattcgtgttgagatcgccgtggtcgctgttctcacgattgtgggcgtcatatcgcaattaaaactctggcgtgtcatccaacagcaccgagatcgtaaagctgaggagcaggccgaggaacggcgaaagcgtgacgaagaagaggcaaaagttgggcaacagattgaagctgaagcccaaagagagcgaaaagtgtgggagaatgtctacggcgatcagacgaccaacggactcgcagcacctggtgactcggatccggagaatgagaaaaaggggcatcccatccacaccaatgtcagccgcgtttctctcgaggaggatgggatcgagatgattgaccttcctgcatcggttggtgtgggctctcccaatctgttgaaggaaacagatgaaaccacaatcaaccaaacacccgtgaaagatgtcggtttaattgaaaacctaaagacggaagcccttcccgagccagaagaaaaagtatggattgtcagcagctcgggtgaagctcggccactttcgtcatcatctcgcccagactcgaaccgattttcagggtctgaatcaccacaaatcattcctctcccattcgcaatacccgatggcccacacgagacagataacaggtcctcatttgcaacttatgccgatgaagacgatcgatcgatcatgctcagtaagagaggcttaagaatgtcattgacgaaccgattatcggtcaactctgcaaatatactacgaagtctgtcgcaaaggtcgggcggctcgcatacatctaagcggaaatcgattgaatcctcacagcctttgcagaatctaaatcaaacaagcagcaccgaagagttagtactcgacagttcgcgtcgttctctcgatgcggcatcatcggttgcagctaccgtcgacggcacaagtattgacggtgagagcctcgcacgacccatgcgtggtggcggtgaacagaactatgtcttagagatggcaggagagatccgtcatggtcaagaggatcatgagatcaaatcgaatgagaagtctgaagacgtagcgaagttgaaatcgccagggcatagtccatatctcgatactcgaccttcagctactgccgagccagctggaacagacacgacgagttcccaaggcttggggcgaacctcgggtagtatatccaagcggagcagcacaaaccatgaaaagacagacggatccaatgggatcagcaacccaacagacatttcggcccctgaggatatgccgcaagtttccaaacgcggaacagcaatcacttcctcaagcgcccttatcttcaccgaaaacggtttacggtccgaattgtctcgcgtcgcagtatcatatcgaacgaatgaatgggccaagcatttaagccatgcagaagcaccagtcgaggataaagtggaaaccgaggaatcttctcacgatcctccaatgagaatagaaagtgaagtagctgcaccactcaagattgaggaactccagcagactcctgttcgcagcatatcatccacggctgtcgtacgaccgccatctgccacgtcaaatttgcaaccgcatcgttcaggatcccgaagttcaccttactcatctcatcttaaaactcaaatgtcgtcaacacttgcgatactgaccggcggtcagtcacattcgccgacgcaggagataagtccgtcaagggttgtacatcatagctttcgaagtaggggaccacgaagatcggactcgcatattcgaccaattttggaggagggcatcgatactgtgtctccctctcaccgactttcgtctgaaggcagcagcactcgtatgcaaaactcaactcccccttcgcctacaggctccaaggcaccaacgcccagatatgattggcctactcctggactccagtctcacacgagtccacagtcactcattgctcaacgggatatgctcttgcgtaacaaatctcaatcgcagcttcttacagcacaaatgattcaagaacagtcccaacaatttgcacgagccccgagccagatcgcctttaactctccatacatgacccttgatgccgacgatctacctctcagccagcgtagagagctcatgcgccaaaacagcatgctgtccattcattcaagtagtgcacggccaagaagaaatagcaccttgtccgccatcaacctcccagctgtcgagaccctaaccgcggaaaacactggtttcaactcacatcaaccacaacgagtctcaacagtgccatctcaatcagagcggaacgcgcgactagccaactttcgcatgtccgtagctgctgatctgcgtagtgggacaccattgggcagaaatggaggctatgacataccagcttcgctcatgcccgttcatgtggatgggcatatcgaaattgctcgatcgctcgaacaacaccacagcactatgttaaaccagaaagatcaagagacgcaacggcgagagagagctcgcttcgagaagcagcggaacgaccgaatcttcgaggagaagatgcaaagtggcgaactcgccgacgcgcaccgtgatgctctgcgtcgaatgcaaagcaacattaagtagagtatttcggacgtctacggcttcgacattgtgttcttagcatatttcctaacttcgtcggcatgagattttcattgtggcgcagtgatgggatgggacatcttggaaaggattcatatcatcatggccggcatcaacatggggcaatgggtacacgattggaaaattctttcttcaaagtcaccactgctacttttacgacttgctgtagacactgcgtcagtctacgaaaacggatctgagcatgttggcagcagcaatctcgactgtttgatacccgaacacgcaatacccgtgctcatgctacatacacattctctttataaccgcaaactagctgcacactgcgatatcctattttcttacgtttttattgtttatcttactgtcatttataagcggaaatacctaatgtttgagtttggtcctcaggttactccggcatgaccttggttggaaggtggcatgaggcaggaacagctggatttcaaggatctggaagacagccgtggaatttgaagattccatgtgtccagggatgacgagtcagctcaagaccaatgaaattgacgtgtcaatcaggaataatgatacggcacctagaggaaagagtcgaagagattagttcgcaccgaacgaagctctggcgacaatgaaattatctttcaatagttcaaaagcgatatgttcgccagcttgtgcactttgacgttcttccatacttagaatgatgagtgtgttaatcttgattaggcggttaacaatatgtcacgaagtggtcttctcgcctgagacaacacagtacgctctatcgagcataaaataggggttcagatgtatatatataccagcgttgttcgccaggttattcggaagacaattagaaagctatcccatgattattacttcccacttgagcgtctacggcacttccgtaagcttccacgatcaccagcctcacctcaatgagacggtacgtgcaaattgtgttgtgacagttttccaacgctttcaatcgtgaaagcagtataccaaggaagttggga

SEQ ID NO: 39947 - DNA, 1527 bp, Muscodor strobelii
  misc_feature: SGI cDNA ID NO. 573914
  misc_feature: Encodes the peptide sequence at SEQ ID NO 39948
atggccgatgaaagctatgcctccgggtcggccaccaccctcaataatcttaataccaacaacaacagtaatgtcggcgcattcagttctcgtgcctctacgtctgctaccacccacgatgcccgctccagctccccagagttccccctgcgacgcgccgcaaccatcaactacccccaggtccgacgccgcataacttccaatatcccacccccttcggccgagaacaacacattcgcgggtctgcgtcgacggagctcgacctactcggacctactcgaaacgagcgccgatgagctgctgaatcccagcaagtcggacacagacaccatcgccacgtccaattttgtctacatcccactcatccttgccttactccctgccgtggccggcatcttctttgataatggtgctgctttcttcacagacttgactctcctcagcatagcagctctctttctacactggtccgtcactcagccatgggattggtaccatacggcccaacaggtccgcgtcgcccaggatgatctcctcaacacttctgttttcgacaccgatagcgaagttgactcggcccaggactctgctgtcactgcgcttgaagaagtacccgaggagacggataagggcaaaggtccggaagagcccacccaggagcccctgcccaagcagccaaggcctcgaaggagcaaacgatgggaagaacggcaaactgcggctgccaaagaactctacgtgtacgaactcttggccttggtctggtgcttcatcttccctatgctctcgtgttacctattgcatactatcagaggccaattgacacgcccatccgaagggctggtgtcggattacaacctcactattttcctttgcgctgccgaggtgcggcccgtcgctcacttgatcaagatgatcaagcttcgcaccgttttttgccagagtatcgtggcgcacaatccgtatgcccagcgcacaaaaacggctcaggacattcaagcactgaatgatcgactggatgatctggaggcacgacccattccagtgcttaacaacaatgtcaatggccacacccgccctgatgaactgaaccgaagcgtcgagtcagttgtggggaaggagttccgcaggagtgttcagccagagctcgaggccttgaatcgcgccatgcgccgctacgaaaagaagctcacccttctcgccaaccagactgacaatcggatcgaatacgtcgattatcggctcaatgatgcgatagccctagccgctattgccgccaaaaacagcaactcgcaatggcctttgacgagttggttgcttgataggactaccactgttgtcgtcttcccattcagagtcgttgcggctgttcttactttcccattccgaacagcatcaatattgttccgcgacaagagcaggacattacctgagagaagccagagatcttcgcggaatggcaggttgcctgggcaaggcagagctaataactctgaccgtgtacctacgcgtctatctagaagatga

SEQ ID NO: 39948 - protein, 508 aa, Muscodor strobelii
  misc_feature: SGI Peptide ID NO. 573914
  misc_feature (63)..(507): NCBI GI: 156052108 Blast Desc: SS1G_07462 [Sclerotinia sclerotiorum 1980] gi|154705239|gb|EDO04978.1| SS1G_07462 [Sclerotinia sclerotiorum 1980]
  misc_feature (84)..(508): NCBI GI: 256732781 Blast Desc: NECHADRAFT_92893 [Nectria haematococca mpVI 77-13-4]
  misc_feature (84)..(508): NCBI GI: 46125787 Blast Desc: FG07271.1 [Gibberella zeae PH-1]
  misc_feature (84)..(505): NCBI GI: 238495334 Blast Desc: conserved [Aspergillus flavus NRRL3357] gi|220695553|gb|EED51896.1| conserved [Aspergillus flavus NRRL3357]
  misc_feature (74)..(498): NCBI GI: 119479737 Blast Desc: NFIA_079410 [Neosartorya fischeri NRRL 181] gi|119408051|gb|EAW18000.1| conserved [Neosartorya fischeri NRRL 181]
  misc_feature (93)..(490): NCBI GI: 121713300 Blast Desc: conserved [Aspergillus clavatus NRRL 1] gi|119402414|gb|EAW12835.1| conserved [Aspergillus clavatus NRRL 1]
  misc_feature (83)..(491): NCBI GI: 171686962 Blast Desc: protein product [Podospora anserina] gi|170943442|emb|CAP69095.1| protein product [Podospora anserina]
  misc_feature (42)..(463): NCBI GI: 70998248 Blast Desc: conserved [Aspergillus fumigatus Af293] gi|66851485|gb|EAL91811.1| conserved [Aspergillus fumigatus Af293] gi|159126414|gb|EDP51530.1| conserved [Aspergillus A1163]
  misc_feature (51)..(461): NCBI GI: 258571822 Blast Desc: [Uncinocarpus reesii 1704] gi|237904984|gb|EEP79385.1| [Uncinocarpus reesii 1704]
  misc_feature (59)..(465): NCBI GI: 239609019 Blast Desc: conserved [Ajellomyces dermatitidis ER-3]
MADESYASGSATTLNNLNTNNNSNVGAFSSRASTSATTHDARSSSPEFPLRRAATINYPQVRRRITSNIPPPSAENNTFAGLRRRSSTYSDLLETSADELLNPSKSDTDTIATSNFVYIPLILALLPAVAGIFFDNGAAFFTDLTLLSIAALFLHWSVTQPWDWYHTAQQVRVAQDDLLNTSVFDTDSEVDSAQDSAVTALEEVPEETDKGKGPEEPTQEPLPKQPRPRRSKRWEERQTAAAKELYVYELLALVWCFIFPMLSCYLLHTIRGQLTRPSEGLVSDYNLTIFLCAAEVRPVAHLIKMIKLRTVFCQSIVAHNPYAQRTKTAQDIQALNDRLDDLEARPIPVLNNNVNGHTRPDELNRSVESVVGKEFRRSVQPELEALNRAMRRYEKKLTLLANQTDNRIEYVDYRLNDAIALAAIAAKNSNSQWPLTSWLLDRTTTVVVFPFRVVAAVLTFPFRTASILFRDKSRTLPERSQRSSRNGRLPGQGRANNSDRVPTRLSRR

SEQ ID NO: 39949 - DNA, 3222 bp, Muscodor strobelii
  misc_feature: SGI EST ID NO. CUFF.96509.0
  misc_feature: Variant of the nucleotide sequence at SEQ ID NO 39947
atcaaattgtacgatttaatttagatacggtaagtgcctgagaggaatacctaatatccacaaagtgtctgcgcaggcacaatgacgcaacgtggagagtgtgaagctgaaaccccaccgacgaggactggaagccctgtaacgcgtatgtaagccgctagagagcagcagttgtggggggacttgtaggtagcagacggtcgagggttggggcatttgctcgcctgcctcgcctgcacctgtgccgccagcacgccttttggcaggtcttggggaagtggcgacagtcggaaagtaaacaagggaaggcatgaagatccctgtccatctccagctgaacctctcccttggtattcttccacctgcaacacgatgatacaccaattgatcaattacacccgctcatccaagggttggcccatgtagaagagccatgtgcatagtcgtttgcgactcacagccctcttcgtacttcctaaccagaggaccgcccgggcaggctgcatatctccggtcgtgcagcgtccagagcctcaactcagctggggcagatgtatgacctcatgcggcccctcgacagcacaggcagcacaagcaccagccttgttgccagcgccggcagcagtaccagccatggccgatgaaagctatgcctccgggtcggccaccaccctcaataatcttaataccaacaacaacagtaatgtcggcgcattcagttctcgtgcctctacgtctgctaccacccacgatgcccgctccagctccccagagttccccctgcgacgcgccgcaaccatcaactacccccaggtccgacgccgcataacttccaatatcccacccccttcggccgagaacaacacattcgcgggtctgcgtcgacggagctcgacctactcggacctactcgaaacgagcgccgatgagctgctgaatcccagcaagtcggacacagacaccatcgccacgtccaattttgtctacatcccactcatccttgccttactccctgccgtggccggcatcttctttgataatggtgctgctttcttcacagacttgactctcctcagcatagcagctctctttctacactggtccgtcactcagccatgggattggtaccatacggcccaacaggtccgcgtcgcccaggatgatctcctcaacacttctgttttcgacaccgatagcgaagttgactcggcccaggactctgctgtcactgcgcttgaagaagtacccgaggagacggataagggcaaaggtccggaagagcccacccaggagcccctgcccaagcagccaaggcctcgaaggagcaaacgatgggaagaacggcaaactgcggctgccaaagaactctacgtgtacgaactcttggccttggtctggtgcttcatcttccctatgctctcgtgttacctattgcatactatcagaggccaattgacacgcccatccgaagggctggtgtcggattacaacctcactattttcctttgcgctgccgaggtgcggcccgtcgctcacttgatcaagatgatcaagcttcgcaccgttttttgccagagtatcgtggcgcacaatccgtatgcccagcgcacaaaaacggctcaggacattcaagcactgaatgatcgactggatgatctggaggcacgacccattccagtgcttaacaacaatgtcaatggccacacccgccctgatgaactgaaccgaagcgtcgagtcagttgtggggaaggagttccgcaggagtgttcagccagagctcgaggccttgaatcgcgccatgcgccgctacgaaaagaagctcacccttctcgccaaccagactgacaatcggatcgaatacgtcgattatcggctcaatgatgcgatagccctagccgctattgccgccaaaaacagcaactcgcaatggcctttgacgagttggttgcttgataggactaccactgttgtcgtcttcccattcagagtcgttgcggctgttcttactttcccattccgaacagcatcaatattgttccgcgacaagagcaggacattacctgagagaagccagagatcttcgcggaatggcaggttgcctgggcaaggcagagctaataactctgaccgtgtacctacgcgtctatctagaagatgaaaccaggtcgacagattcattgcacttcaagatcgtttctagtccgagatcctgctcttgcgcaacctcgacacacttgctcacactcacacctcgccttcgaggcagctcattcgcatatactatgaactcatctacccactgctagagcaagctccgatcaatcggaagcatcgaatccaccgcgacaggtgctctccacataagtcacgcttttaattcagtctcgaacccttctcgtggttaggtaagctgcctcgttttttgagcctcaaactatggcggtattatgaattatgagagcaagagttgcaggcatgcagctcaagtagtcaggtcacggggctgagagtaagatgggcacatcagggtcggatgtacggtattattgagtatgcatcattatgattccgttatcggcttgactgtgaaatccgccaggcaaagcgagcgtctgtatgcatacatgaacggcacaagctcctatctttatgcaccctttcttcgacgtcggagatgcttcgaagggtaggctgattgatgagggagcatactttacagtggtttacgataatgataaattaaagttaactcttgtcaaagtatctacctgaatcgtaccagtttcggttaaagtcacgtacgttactgctgagatgtgagggtccgatatgagtgagaattgctggcaatgcagcggaaagaatcttattaagtggctgctttagaaaagatacccgtaacgaagtcaaggtcttcaataccgaatatattcgatgcttgaacccgttcacgtaacgtgctctaaagcgctatcaaatgctcctggttatctcaactatctacgattatgaggcgagaatggttgttgaatgtcttgactactgggtatgatatggagagaaatactcggatcccaatgcgggaatgatgtatactctcgacgagcagggacttggaagcgcagagattgtgcagagaagaggaatatggaatgtaaatggtagttgcctgtaagatagttctgagagttatagggatgagttgttaaacatgtatagg

SEQ ID NO: 39950 - DNA, 798 bp, Muscodor strobelii
  misc_feature: SGI cDNA ID NO. 573915
  misc_feature: Reduced expression when VOC is produced
  misc_feature: Encodes the peptide sequence at SEQ ID NO 39951
atgcccctagctcaacccgtcgagtttgttcaattgggcctagtcgcatgcatcccagcaatttcggcacgcataacgtcgaccaatctcttcttcccatcaccccttggcgccctggtcacctcgagagcgacgagcaacgcgaacgccagcgacaacgacgataataactctaattctccccgccacaaccatcgccgcatccaccacaattcgacctcgcgacgatactttctttacagaccgagcgtcctagctaagccacaatatctcggcgccttcactaatactcgatcgatctcgccacctgcaaaccccgtatcgtccaccctagacaacaaggaaaccgacgtaaatgagtccgccctcgagcctcacaccctcaagccaatccccactggccaacacgttcagccactgagacccgcccttctcaataacttcgcatccccattccggacccgtgccggcagaaacaaggacgacaagcatcttcctcgcatcatcagtcagcccggacgcctctggaatcccaccaattccaccccaaggccacctccggttgccgcaacccgtgacgcccccaagtctcgcatccgtcgatcttcaactcctccacctcctcctatccccgtccaacacccgactcttcacgttacaagtgttccagatgattcggacttcgctggtccaagtgacatcccgctattaactctcgccgagcagcgccagactcgacatcctgattccgcccgtgccagtctccaaatcgagggccgtctgagtgaagacaagaga

SEQ ID NO: 39951 - protein, 266 aa, Muscodor strobelii
  misc_feature: SGI Peptide ID NO. 573915
  misc_feature (132)..(266): NCBI GI: 256733226 Blast Desc: NECHADRAFT_68612 [Nectria haematococca mpVI 77-13-4]
  misc_feature (141)..(266): NCBI GI: 46125789 Blast Desc: FG07272.1 [Gibberella zeae PH-1]
  misc_feature: Useful for introducing or modulating the production of volatile compounds
MPLAQPVEFVQLGLVACIPAISARITSTNLFFPSPLGALVTSRATSNANASDNDDNNSNSPRHNHRRIHHNSTSRRYFLYRPSVLAKPQYLGAFTNTRSISPPANPVSSTLDNKETDVNESALEPHTLKPIPTGQHVQPLRPALLNNFASPFRTRAGRNKDDKHLPRIISQPGRLWNPTNSTPRPPPVAATRDAPKSRIRRSSTPPPPPIPVQHPTLHVTSVPDDSDFAGPSDIPLLTLAEQRQTRHPDSARASLQIEGRLSEDKR

SEQ ID NO: 39952 - DNA, 1308 bp, Muscodor strobelii
  misc_feature: SGI cDNA ID NO. 573916
  misc_feature: Encodes the peptide sequence at SEQ ID NO 39953
atgtcttcaaccgaaggattcaaagtcatcgttgtgggcggtggcccagttggcctaatggccgctcaagcgctcactaaagctggtatcgactttgttatgctcgagggacgggacgaagcagtcactaaagccggttctcacatcgtcctcagcgttatcggattgaatgctttagggggcgtaggtctaggcgatgcgatcaatcaggtcagcacagacttgcctgagctcagacgcatcaatgataagggccaggatatcggcactctgaacttcttcgagtggacaaagagagatttcggtacttattccaaagtcatcagccgctacgacttgacgagaaccctctacgagtctctgcctgctgagtcacgggccaagattctcactggaaagagagtatccgacatcaagacagaagacgacagtgttagtgtcacatgcaaagacggttcgatttacacaggatctctagtcattggtgcggacggagctcacagtgttgttcgtcaacacatgcggtcgttagcgctagaagccggctctgatgaggtcaacgaggagaagccatacctgacaacttatcgctgcatttgcattcgattcccctcagctctttcagataaaattcatcctggtttggcgtctgagacgcatagccaaggtgcttgctgccaacttttcgtcggcgaggaagatgctgtatgtggtatctatgagacgatggaagcaccgacccgagaccgtataaggtatactcaagaagaccaagacgccatcgtcgagcgaattggtcatctacccataattaagggtgatggcttgaccatccgagatgcatatgagaacaaagtcgacagcctcatggtgagcctcgaagaaggagttgttgatcactggagctacgacggacgtatcgtacttgcgggcgacgcggcgcataagttcacgccaatcacaggagctggttgcaacaatggcatggccgatgtcgtcgccctggccaacgaaatgcacaaggcgttctgcggagctggcgcgacaccaagcagagctcagctagcatctgctttcaaagactaccaagaaaagcgatttgacgaggttaccaaggcatgtgctggagcaggtcgcgtcacggccacatcgacatgggcaactggcatgcatggcttcatcgaccgccacgtcctaggctacaaacttgtgcagcggtacttgtggaacaaaagcaaggcgcccgcaacactctcgttctatttccaggatgagaaagggactgcagcagttgcctctgcagcataa

SEQ ID NO: 39953 - protein, 435 aa, Muscodor strobelii
  misc_feature: SGI Peptide ID NO. 573916
  misc_feature (6)..(377): Pfam Id: PF01494 Pfam Desc: FAD binding domain
  misc_feature (6)..(36): Pfam Id: PF01494 Pfam Desc: FAD binding domain
  misc_feature (297)..(336): Pfam Id: PF01494 Pfam Desc: FAD binding domain
  misc_feature (7)..(29): Pfam Id: PF03486 Pfam Desc: HI0933-like protein
  misc_feature (5)..(408): NCBI GI: 46115866 Blast Desc: FG03775.1 [Gibberella zeae PH-1]
  misc_feature (7)..(411): NCBI GI: 256728452 Blast Desc: NECHADRAFT_97875 [Nectria haematococca mpVI 77-13-4]
  misc_feature (8)..(414): NCBI GI: 145606496 Blast Desc: MGG_02292 [Magnaporthe grisea 70-15] gi|145014141|gb|EDJ98782.1| MGG_02292 [Magnaporthe grisea 70-15]
  misc_feature (3)..(410): NCBI GI: 145241766 Blast Desc: An09g02150 [Aspergillus niger] gi|134078069|emb|CAK40152.1| protein product [Aspergillus niger]
  misc_feature (7)..(410): NCBI GI: 256734858 Blast Desc: NECHADRAFT_75548 [Nectria haematococca mpVI 77-13-4]
  misc_feature (3)..(408): NCBI GI: 256728204 Blast Desc: NECHADRAFT_54017 [Nectria haematococca mpVI 77-13-4]
  misc_feature (3)..(415): NCBI GI: 256722361 Blast Desc: NECHADRAFT_82202 [Nectria haematococca mpVI 77-13-4]
  misc_feature (7)..(370): NCBI GI: 154313266 Blast Desc: BC1G_05330 [Botryotinia fuckeliana B05.10] gi|150849399|gb|EDN24592.1| BC1G_05330 [Botryotinia fuckeliana B05.10]
  misc_feature (4)..(426): NCBI GI: 189197565 Blast Desc: FAD binding domain containing protein [Pyrenophora tritici-repentis Pt-1C-BFP] gi|187981068|gb|EDU47694.1| FAD binding domain containing protein [Pyrenophora tritici-repentis
  misc_feature (1)..(408): NCBI GI: 145234591 Blast Desc: An03g00370 [Aspergillus niger] gi|134057615|emb|CAK38015.1| protein product [Aspergillus niger]
  misc_feature (8)..(366): SWISSPROT Homolog: EC 1.14.13.9 Kynurenine 3-monooxygenase
MSSTEGFKVIVVGGGPVGLMAAQALTKAGIDFVMLEGRDEAVTKAGSHIVLSVIGLNALGGVGLGDAINQVSTDLPELRRINDKGQDIGTLNFFEWTKRDFGTYSKVISRYDLTRTLYESLPAESRAKILTGKRVSDIKTEDDSVSVTCKDGSIYTGSLVIGADGAHSVVRQHMRSLALEAGSDEVNEEKPYLTTYRCICIRFPSALSDKIHPGLASETHSQGACCQLFVGEEDAVCGIYETMEAPTRDRIRYTQEDQDAIVERIGHLPIIKGDGLTIRDAYENKVDSLMVSLEEGVVDHWSYDGRIVLAGDAAHKFTPITGAGCNNGMADVVALANEMHKAFCGAGATPSRAQLASAFKDYQEKRFDEVTKACAGAGRVTATSTWATGMHGFIDRHVLGYKLVQRYLWNKSKAPATLSFYFQDEKGTAAVASAA

SEQ ID NO: 39954 - DNA, 1975 bp, Muscodor strobelii
  misc_feature: SGI EST ID NO. CUFF.96521.0
  misc_feature: Variant of the nucleotide sequence at SEQ ID NO 39952
cttgaaagttgctccgacttctttgttccgttgaattcgcgctagtaaatgcgaggacagacacactcagactcctcgcattctgggcaactcaatcttcgagaatccgaaaatacacagaattcagccgactgttggtatcatgcgcaaaatgaaaccaaaacggaactgtggcgtgggcgctgggtttgtatatataatgttcaccatggacgacgaagaagatgtattgagagaccacagacacaatagaatcacaatcaacactgcctacaataacaaactactattcgcatcattgcttatttcataaaacataactcgaacatttacatatctcgtcttatctaaacacccatccaatgtcttcaaccgaaggattcaaagtcatcgttgtgggcggtggcccagttggcctaatggccgctcaagcgctcactaaagctggtatcgactttgttatgctcgagggacgggacgaagcagtcactaaagccggttctcacatcgtcctcagcgttatcggattgaatgctttagggggcgtaggtctaggcgatgcgatcaatcaggtcagcacagacttgcctgagctcagacgcatcaatgataagggccaggatatcggcactctgaacttcttcgagtggacaaagagagatttcggtacttattccaaagtcatcagccgctacgacttgacgagaaccctctacgagtctctgcctgctgagtcacgggccaagattctcactggaaagagagtatccgacatcaagacagaagacgacagtgttagtgtcacatgcaaagacggttcgatttacacaggatctctagtcattggtgcggacggagctcacagtgttgttcgtcaacacatgcggtcgttagcgctagaagccggctctgatgaggtcaacgaggagaagccatacctgacaacttatcgctgcatttgcattcgattcccctcagctctttcagataaaattcatcctggtttggcgtctgagacgcatagccaaggtgcttgctgccaacttttcgtcggcgaggaagatgctgtatgtggtatctatgagacgatggaagcaccgacccgagaccgtataaggtatactcaagaagaccaagacgccatcgtcgagcgaattggtcatctacccataattaagggtgatggcttgaccatccgagatgcatatgagaacaaagtcgacagcctcatggtgagcctcgaagaaggagttgttgatcactggagctacgacggacgtatcgtacttgcgggcgacgcggcgcataagttcacgccaatcacaggagctggttgcaacaatggcatggccgatgtcgtcgccctggccaacgaaatgcacaaggcgttctgcggagctggcgcgacaccaagcagagctcagctagcatctgctttcaaagactaccaagaaaagcgatttgacgaggttaccaaggcatgtgctggagcaggtcgcgtcacggccacatcgacatgggcaactggcatgcatggcttcatcgaccgccacgtcctaggctacaaacttgtgcagcggtacttgtggaacaaaagcaaggcgcccgcaacactctcgttctatttccaggatgagaaagggactgcagcagttgcctctgcagcataatcaagtatcggcattatatttctttaaatgtacaaaatctgcttgtcttgcatagaaggcgtggttatgatagaattagactagcatgggttttggactgtcatacattctgtaattctaatttcctcactcacttaaccacatcagtataataattccacgagatcaatgacgaagaaataggtctataacatgtggactttgctcgtcttcccaaaatcaggaaaccttaactagctcggatgtttggcccttgatcaaatgcctacttgtagaattcaaagtccctcaagtaaaatagtggc

SEQ ID NO: 39955 - DNA, 609 bp, Muscodor strobelii
  misc_feature: SGI cDNA ID NO. 573917
  misc_feature: Encodes the peptide sequence at SEQ ID NO 39956
atgacgcgcaaatgggtgtactggacagccttagccgtctttacctgcaccacggcactaaccctcacatctctcttcacgacacactgggtatcgtacagcataagagaaggaaacacgggcaaccacttcaccaagacggtcggcctgcacaggacgtgtaatcccttcggcaccccagagaaaccgctatgccagcccttcccgtccgaggaccaatgccgcgaatttaagggcttctgctcgtggtggcgcacgagcaacttcttgatgtggttcgcgaccatcttcgagctcgccaccctcgtcaccttcctcgttgtgcttttcggcgggaaatacaagcgtgaggggggttggaagctcatctgctccttccttgttgcggatgctgcagtcgaattcgccactacaggcatagtgacccacgtcgtggagaacaaccactggttcttcaacgtccccggctggtacttcgactactccttctatctctgcaacgtcagcgccagcgtatccctactcatggtcttcgggctcgtagcctccgcctacctgctgccgcccgaggacgactacgagtatctcgaggatcccttcgatggctag

SEQ ID NO: 39956 - protein, 202 aa, Muscodor strobelii
  misc_feature: SGI Peptide ID NO. 573917
  misc_feature (1)..(200): NCBI GI: 261351964 Blast Desc: conserved [Verticillium albo-atrum VaMs.102]
  misc_feature (1)..(202): NCBI GI: 256732059 Blast Desc: NECHADRAFT_93511 [Nectria haematococca mpVI 77-13-4]
  misc_feature (1)..(202): NCBI GI: 46137485 Blast Desc: FG10258.1 [Gibberella zeae PH-1]
  misc_feature (1)..(199): NCBI GI: 145605756 Blast Desc: MGG_11804 [Magnaporthe grisea 70-15] gi|145013554|gb|EDJ98195.1| MGG_11804 [Magnaporthe grisea 70-15]
  misc_feature (1)..(202): NCBI GI: 154296313 Blast Desc: BC1G_12983 [Botryotinia fuckeliana B05.10] gi|150843441|gb|EDN18634.1| BC1G_12983 [Botryotinia fuckeliana B05.10]
  misc_feature (1)..(196): NCBI GI: 156055756 Blast Desc: SS1G_05230 [Sclerotinia sclerotiorum 1980] gi|154703014|gb|EDO02753.1| SS1G_05230 [Sclerotinia sclerotiorum 1980]
  misc_feature (1)..(202): NCBI GI: 116206728 Blast Desc: CHGG_02657 [Chaetomium globosum CBS 148.51] gi|88183254|gb|EAQ90722.1| CHGG_02657 [Chaetomium globosum CBS 148.51]
  misc_feature (1)..(202): NCBI GI: 189191130 Blast Desc: conserved [Pyrenophora tritici-repentis Pt-1C-BFP] gi|187973510|gb|EDU41009.1| conserved [Pyrenophora tritici-repentis Pt-1C-BFP]
  misc_feature (1)..(198): NCBI GI: 169783224 Blast Desc: [Aspergillus oryzae RIB40] gi|238492989|ref|XP_002377731.1| conserved [Aspergillus flavus NRRL3357] gi|83774818|dbj|BAE64941.1| protein product oryzae]
  misc_feature (20)..(201): NCBI GI: 169606798 Blast Desc: SNOG_06448 [Phaeosphaeria nodorum SN15] gi|160707081|gb|EAT86279.2| SNOG_06448 [Phaeosphaeria nodorum SN15]
MTRKWVYWTALAVFTCTTALTLTSLFTTHWVSYSIREGNTGNHFTKTVGLHRTCNPFGTPEKPLCQPFPSEDQCREFKGFCSWWRTSNFLMWFATIFELATLVTFLVVLFGGKYKREGGWKLICSFLVADAAVEFATTGIVTHVVENNHWFFNVPGWYFDYSFYLCNVSASVSLLMVFGLVASAYLLPPEDDYEYLEDPFDG

SEQ ID NO: 39957 - DNA, 3467 bp, Muscodor strobelii
  misc_feature: SGI EST ID NO. CUFF.96528.0
  misc_feature: Variant of the nucleotide sequence at SEQ ID NO 39955
ctacgaattgctctatttttaacaaaactatagagaattgatgagcccgaggaacacattaagatcgattcaagctctctacgcacggaatacttagtccttccaagcttgcgaccaatccccgccaagccaagaggttggagatcgacgggttgcattactcgaacggcgctttgcgacattcacctccaagctaccccataattggcctccacatcagttgcccagctgatcgaattgctgataaccgtcaccaaccatccacgccaggccggacgattgaaaaaccactcttttaacgacaccgcttcctcaccgaggccattccggtgatatatagttctctacacggctctcaggctgctgtacctattcgaatcatacgtcgaacagccacattccagcatcgccatgacgcgcaaatgggtgtactggacagccttagccgtctttacctgcaccacggcactaaccctcacatctctcttcacgacacactgggtatcgtacagcataagagaaggaaacacgggcaaccacttcaccaagacggtcggcctgcacaggacgtgtaatcccttcggcaccccagagaaaccgctatgccagcccttcccgtccgaggaccaatgccgcgaatttaagggcttctgctcgtggtggcgcacgagcaacttcttgatgtggttcgcgaccatcttcgagctcgccaccctcgtcaccttcctcgttgtgcttttcggcgggaaatacaagcgtgaggggggttggaagctcatctgctccttccttgttgcggatgctgcagtcgaattcgccactacaggcatagtgacccacgtcgtggagaacaaccactggttcttcaacgtccccggctggtacttcgactactccttctatctctgcaacgtcagcgccagcgtatccctactcatggtcttcgggctcgtagcctccgcctacctgctgccgcccgaggacgactacgagtatctcgaggatcccttcgatggctagaagcacaaacgagtggacccccgactcgggagtatggtttagttataccagcaactctccgatcatcacgcatttgaaatatccatctttattgtcttattgttcgcatcaccccttcaggcgttttgggtgtcgtaaagtcataaccaggagtatagggtaacgtcactaagctatgattctcgtgtgccgttttagtatggattttggaaacattatcattacatcaggtagcggcaggagcggaactcgcatgtttcaatttagtaacatttcgaaatggcaagcgatttttgacagtcataagaaaacattatttttgcgcagttgatgccgtctacgtataatgttcacgtcaagatcacgaggagtatgtagagtccaccctctttagaaggttcggaaaggttcggatgtgctttggataacttcgcagctccatggatacaataatggacgcagttgtgaagtgtaaacgacctgaatgcttctctttatttttcttgggtatctatttgtatctggcagctcgggggctagtagcatcgacgacaccacaggtccgtgggttagtacacagtcgccgatatgtaattacatgtgtgtgttttccctacagactgaactctctctctactacctgcttagcacgacttcatccccctgaagtctgaccttgagaagtctgcctctcagtgtgacaatggtatcctattcatcgtcagacgaagagtcagagccggactcggattcagactctgatgaggatgaagaagagctacttgaggaagtatctcctgcgtttgtgttcgccgtaacaccgatctcattgccgtctgaatcatcggatgagctgctactgctctcgctagagctcgtatcagagtcagaatcggactcagactccgagcttgtgtcgtcctctacaacggctgtcctggctttcctcttgcgcttgagtctctgtggctctgtgtcatcattaagcctgaggcgtttattgcctttcatagcatcttcttcctcgggagccttagcagtagactctgaacttgcagtagttgtcgtcgtttccgattcgtcggtctctgagagttcttcaagtaccatttcggcgcgcattcgcttcaccacacgccgctgcatctccatgtctgtggtccggagaacatagtccatctcatcaaaccgcctcttcttggccgtcggtggctgacctaagaatgtcttgatgatatcctcatactccttctgcttccgctccgtcatctccttcttcgtagaagctgtgaatcccgcagatccttcctccatgtcttttgccttgacgccgttggcgagctcgcgtagtctggtacgtacacccccttttaagttactgatgtattcatagaagacactgatatcaactgccggtatagtggtctcgggttcaaagacttgctccaataacttcgtctggtgattcttgttgaatttccagctgtcacgtgccgtatgccaagtacgaagataggtaagtgcaggctccaggttgacgggagcagcccgcttgattggtttcgtaggcggtgtcgctggcgcagcaccctttccggtgtttagcactgttttctgcttcggcttctgcttcttagcgacaactgccccattgggcgcgggagacgccggctcggcagctacgtccgccgcaaaggaaacggactttgctttcttgggtgcagattttggctgcgaagggctggtgtggctctgccagttgtcctgccttgctcttttggtcgcagggtccaatgcaggggaactattggatgcctttctcttcgcatatggggtagaacctggtgcgccaatgtttgcacggttgtcgggcactggtgaggcagcaccagcagaagagagtgcggtagaggtgggatgggagggagcctcatggccacttcgtgcttcagatgcgggcttgagcttgagacccaatcgcttccaggctggtactcgctgcgctggcggcgcgtcaccagtggagttgaaagaagacatgagcagagattgggcaggaatggggatcggggaatcctaaatgctactgcagcgttccagtgttcatttacacggagaagaattttgagaagatattcacagccacgccaggacgttctctcgacgaagagaaaggatgtctacaagagacgaatttgcgacgatgtatgagttgctgatttgagtaatgaagttggatagctaggtcttgtgtccaccagctacttgcttgtctaagtcaggttgttagcctttctctgcaagccttgttgccggggtgcaaggccaattgctgtgaaatgtgaaaaaaaagaaaaacaaatgagcatttcatctgaaacgccaataatctgcttctagctatcgagtatcggcgtagtattacatctcctttgtgcaagtcttca

SEQ ID NO: 39958 - DNA, 1329 bp, Muscodor strobelii
  misc_feature: SGI cDNA ID NO. 573918
  misc_feature: Encodes the peptide sequence at SEQ ID NO 39959
atgtcttctttcaactccactggtgacgcgccgccagcgcagcgagtaccagcctggaagcgattgggtctcaagctcaagcccgcatctgaagcacgaagtggccatgaggctccctcccatcccacctctaccgcactctcttctgctggtgctgcctcaccagtgcccgacaaccgtgcaaacattggcgcaccaggttctaccccatatgcgaagagaaaggcatccaatagttcccctgcattggaccctgcgaccaaaagagcaaggcaggacaactggcagagccacaccagcccttcgcagccaaaatctgcacccaagaaagcaaagtccgtttcctttgcggcggacgtagctgccgagccggcgtctcccgcgcccaatggggcagttgtcgctaagaagcagaagccgaagcagaaaacagtgctaaacaccggaaagggtgctgcgccagcgacaccgcctacgaaaccaatcaagcgggctgctcccgtcaacctggagcctgcacttacctatcttcgtacttggcatacggcacgtgacagctggaaattcaacaagaatcaccagacgaagttattggagcaagtctttgaacccgagaccactataccggcagttgatatcagtgtcttctatgaatacatcagtaacttaaaagggggtgtacgtaccagactacgcgagctcgccaacggcgtcaaggcaaaagacatggaggaaggatctgcgggattcacagcttctacgaagaaggagatgacggagcggaagcagaaggagtatgaggatatcatcaagacattcttaggtcagccaccgacggccaagaagaggcggtttgatgagatggactatgttctccggaccacagacatggagatgcagcggcgtgtggtgaagcgaatgcgcgccgaaatggtacttgaagaactctcagagaccgacgaatcggaaacgacgacaactactgcaagttcagagtctactgctaaggctcccgaggaagaagatgctatgaaaggcaataaacgcctcaggcttaatgatgacacagagccacagagactcaagcgcaagaggaaagccaggacagccgttgtagaggacgacacaagctcggagtctgagtccgattctgactctgatacgagctctagcgagagcagtagcagctcatccgatgattcagacggcaatgagatcggtgttacggcgaacacaaacgcaggagatacttcctcaagtagctcttcttcatcctcatcagagtctgaatccgagtccggctctgactcttcgtctgacgatgaatag

SEQ ID NO: 39959 - protein, 442 aa, Muscodor strobelii
  misc_feature: SGI Peptide ID NO. 573918
  misc_feature (15)..(368): NCBI GI: 171694449 Blast Desc: protein product [Podospora anserina] gi|170947173|emb|CAP73978.1| protein product [Podospora anserina]
  misc_feature (16)..(326): NCBI GI: 116197591 Blast Desc: CHGG_06951 [Chaetomium globosum CBS 148.51] gi|88178230|gb|EAQ85698.1| CHGG_06951 [Chaetomium globosum CBS 148.51]
  misc_feature (48)..(344): NCBI GI: 261351966 Blast Desc: conserved [Verticillium albo-atrum VaMs.102]
  misc_feature (15)..(323): NCBI GI: 46137481 Blast Desc: FG10256.1 [Gibberella zeae PH-1]
  misc_feature (169)..(321): NCBI GI: 85089255 Blast Desc: NCU10062 [Neurospora crassa OR74A] gi|28919182|gb|EAA28672.1| [Neurospora crassa OR74A]
  misc_feature (15)..(371): NCBI GI: 256731682 Blast Desc: NECHADRAFT_93506 [Nectria haematococca mpVI 77-13-4]
  misc_feature (172)..(369): NCBI GI: 154296311 Blast Desc: BC1G_12982 [Botryotinia fuckeliana B05.10] gi|150843440|gb|EDN18633.1| BC1G_12982 [Botryotinia fuckeliana B05.10]
  misc_feature (165)..(369): NCBI GI: 156055754 Blast Desc: SS1G_05229 [Sclerotinia sclerotiorum 1980] gi|154703013|gb|EDO02752.1| SS1G_05229 [Sclerotinia sclerotiorum 1980]
  misc_feature (12)..(340): NCBI GI: 145610505 Blast Desc: MGG_01154 [Magnaporthe grisea 70-15] gi|145017873|gb|EDK02152.1| MGG_01154 [Magnaporthe grisea 70-15]
  misc_feature (172)..(313): NCBI GI: 70999538 Blast Desc: AFUA_3G11310 [Aspergillus fumigatus Af293] gi|66852125|gb|EAL92450.1| AFUA_3G11310 [Aspergillus fumigatus Af293] gi|159127506|gb|EDP52621.1| AFUB_037870 [Aspergillus
MSSFNSTGDAPPAQRVPAWKRLGLKLKPASEARSGHEAPSHPTSTALSSAGAASPVPDNRANIGAPGSTPYAKRKASNSSPALDPATKRARQDNWQSHTSPSQPKSAPKKAKSVSFAADVAAEPASPAPNGAVVAKKQKPKQKTVLNTGKGAAPATPPTKPIKRAAPVNLEPALTYLRTWHTARDSWKFNKNHQTKLLEQVFEPETTIPAVDISVFYEYISNLKGGVRTRLRELANGVKAKDMEEGSAGFTASTKKEMTERKQKEYEDIIKTFLGQPPTAKKRRFDEMDYVLRTTDMEMQRRVVKRMRAEMVLEELSETDESETTTTTASSESTAKAPEEEDAMKGNKRLRLNDDTEPQRLKRKRKARTAVVEDDTSSESESDSDSDTSSSESSSSSSDDSDGNEIGVTANTNAGDTSSSSSSSSSSESESESGSDSSSDDE

SEQ ID NO: 39960 - DNA, 768 bp, Muscodor strobelii
  misc_feature: SGI cDNA ID NO. 573919
  misc_feature: Encodes the peptide sequence at SEQ ID NO 39961
atgtcgggcggcagcgctggttatgaccggcatattaccatcttctccgagcagggcaggctctaccaagtcgagtatgcattcaaggccattaccgccgccaacatcatggccattggtgtccgaggcaaggactgcgccgtcgtgctatcacagaaaaaggtccctgacaagctaatcgatccttcctccgtctcccacatcttccagatctcgccctccgttggctgcgtcatgaccggctccatcgcagacgcgcgtgcattcgctcagcgagcccagggcgaggcggccgagtttcgctacaagtatggttatgagatgccatgtgatgtcctggccaagagattggccaatatcagtcaagtctacacgcagagagcatatatgcgcccttacggtgtggcaacgacactgatatcactggacgccgaggttgggcctcagctcttcaagtgcgaccctgccggctactacgttgggtataagggtaccgccgctgggccgaagcaacaagaggctctcaaccacctggagaagaaactgaagagcaaggatcacgcagaaggcaattgggaggaggttgtggagcttgccatcaccacgctgagcaccgttttgagcatggacttcaagaagggtgagattgagattggcatagtgggaggcccacgtgcggatggcaaggaaggaacggaccctgccttcagaaccctgacggaagaggagatagacgaccgacttcaagccattgccgagaaggactag

SEQ ID NO: 39961 - protein, 255 aa, Muscodor strobelii
  misc_feature: SGI Peptide ID NO. 573919
  misc_feature (36)..(221): Pfam Id: PF00227 Pfam Desc: Proteasome A-type and B-type
  misc_feature (1)..(255): NCBI GI: 261351967 Blast Desc: proteasome subunit alpha type-6-B [Verticillium albo-atrum VaMs.102]
  misc_feature (4)..(255): NCBI GI: 39973401 Blast Desc: conserved [Magnaporthe grisea 70-15] gi|145017874|gb|EDK02153.1| conserved [Magnaporthe grisea 70-15]
  misc_feature (4)..(255): NCBI GI: 116197589 Blast Desc: conserved [Chaetomium globosum CBS 148.51] gi|88178229|gb|EAQ85697.1| conserved [Chaetomium globosum CBS 148.51]
  misc_feature (4)..(255): NCBI GI: 85089251 Blast Desc: proteasome subunit alpha type 6 [Neurospora crassa OR74A] gi|28919181|gb|EAA28671.1| proteasome subunit alpha type 6 [Neurospora crassa OR74A]
  misc_feature (4)..(255): NCBI GI: 171694447 Blast Desc: protein product [Podospora anserina] gi|170947172|emb|CAP73977.1| protein product [Podospora anserina]
  misc_feature (1)..(255): NCBI GI: 256732056 Blast Desc: [Nectria haematococca mpVI 77-13-4]
  misc_feature (4)..(255): NCBI GI: 154296309 Blast Desc: conserved [Botryotinia fuckeliana B05.10] gi|156055752|ref|XP_001593800.1| conserved [Sclerotinia sclerotiorum 1980] gi|150843439|gb|EDN18632.1| conserved B05.10]
  misc_feature (1)..(255): NCBI GI: 46137479 Blast Desc: FG10255.1 [Gibberella zeae PH-1]
  misc_feature (4)..(255): NCBI GI: 261194120 Blast Desc: proteasome component C7-alpha [Ajellomyces dermatitidis SLH14081] gi|239588479|gb|EEQ71122.1| proteasome component C7-alpha [Ajellomyces dermatitidis SLH14081] proteasome
  misc_feature (4)..(255): NCBI GI: 225681671 Blast Desc: proteasome subunit alpha type-6 [Paracoccidioides brasiliensis Pb03]
  misc_feature (3)..(255): SWISSPROT Homolog: EC 3.4.25.1 Proteasome endopeptidase complex
MSGGSAGYDRHITIFSEQGRLYQVEYAFKAITAANIMAIGVRGKDCAVVLSQKKVPDKLIDPSSVSHIFQISPSVGCVMTGSIADARAFAQRAQGEAAEFRYKYGYEMPCDVLAKRLANISQVYTQRAYMRPYGVATTLISLDAEVGPQLFKCDPAGYYVGYKGTAAGPKQQEALNHLEKKLKSKDHAEGNWEEVVELAITTLSTVLSMDFKKGEIEIGIVGGPRADGKEGTDPAFRTLTEEEIDDRLQAIAEKD

SEQ ID NO: 39962 - DNA, 1443 bp, Muscodor strobelii
  misc_feature: SGI EST ID NO. CUFF.96561.0
  misc_feature: Variant of the nucleotide sequence at SEQ ID NO 39960
gtcggtgggagcacactgcaaggcagggcagctgtgtcgtcaacatccaaacctcagtcaagcgtttgcagtcttgcttgcactgacgtccacgctcgcaataattccacaaccatctccgcccaatcgacatccgtaacctcacccctatctccagcttcgccttcgccttcgcctacatcctcgtggagtctcaagcgctacctcaccgttctcccccgcaacagccgtcatcatgtcgggcggcagcgctggttatgaccggcatattaccatcttctccgagcagggcaggctctaccaagtcgagtatgcattcaaggccattaccgccgccaacatcatggccattggtgtccgaggcaaggactgcgccgtcgtgctatcacagaaaaaggtccctgacaagctaatcgatccttcctccgtctcccacatcttccagatctcgccctccgttggctgcgtcatgaccggctccatcgcagacgcgcgtgcattcgctcagcgagcccagggcgaggcggccgagtttcgctacaagtatggttatgagatgccatgtgatgtcctggccaagagattggccaatatcagtcaagtctacacgcagagagcatatatgcgcccttacggtgtggcaacgacactgatatcactggacgccgaggttgggcctcagctcttcaagtgcgaccctgccggctactacgttgggtataagggtaccgccgctgggccgaagcaacaagaggctctcaaccacctggagaagaaactgaagagcaaggatcacgcagaaggcaattgggaggaggttgtggagcttgccatcaccacgctgagcaccgttttgagcatggacttcaagaagggtgagattgagattggcatagtgggaggcccacgtgcggatggcaaggaaggaacggaccctgccttcagaaccctgacggaagaggagatagacgaccgacttcaagccattgccgagaaggactagtggatgaggcggttaaggcataaggctgagagtcccatgagagcatctcattcgcctggcacaagcctggcgcgggacttatgtttgccacccattgtaaccatatgaggatggagactggggttttgacagctgccccatgacccctttgcgcaatagtaacatgatatcccatagagctctgcaagacactagatcccgatgcgtcgatacggtgctgacaacactcatcaatctttacacaccgctgctgaagcaggctgctatgggttcttacatcattctaatagcgcgtccggataatcagatttgatattgcagccgatgcctgctgaagaggtgctcgaagtttccgtctcggccctgccgcacatttactatcttcaacgaaacaatatgagttttgcgtcaccaaaatgagaagtaaacagaccgtatct

SEQ ID NO: 39963 - DNA, 795 bp, Muscodor strobelii
  misc_feature: SGI cDNA ID NO. 573920
  misc_feature: Encodes the peptide sequence at SEQ ID NO 39964
atgtcgggcgagattctgactttcttatttgacacaggcagcgctggttatgaccggcatattaccatcttctccgagcagggcaggctctaccaagtcgagtatgcattcaaggccattaccgccgccaacatcatggccattggtgtccgaggcaaggactgcgccgtcgtgctatcacagaaaaaggtccctgacaagctaatcgatccttcctccgtctcccacatcttccagatctcgccctccgttggctgcgtcatgaccggctccatcgcagacgcgcgtgcattcgctcagcgagcccagggcgaggcggccgagtttcgctacaagtatggttatgagatgccatgtgatgtcctggccaagagattggccaatatcagtcaagtctacacgcagagagcatatatgcgcccttacggtgtggcaacgacactgatatcactggacgccgaggttgggcctcagctcttcaagtgcgaccctgccggctactacgttgggtataagggtaccgccgctgggccgaagcaacaagaggctctcaaccacctggagaagaaactgaagagcaaggatcacgcagaaggcaattgggaggaggttgtggagcttgccatcaccacgctgagcaccgttttgagcatggacttcaagaagggtgagattgagattggcatagtgggaggcccacgtgcggatggcaaggaaggaacggaccctgccttcagaaccctgacggaagaggagatagacgaccgacttcaagccattgccgagaaggactag

SEQ ID NO: 39964 - protein, 264 aa, Muscodor strobelii
  misc_feature: SGI Peptide ID NO. 573920
  misc_feature (45)..(230): Pfam Id: PF00227 Pfam Desc: Proteasome A-type and B-type
  misc_feature (12)..(264): NCBI GI: 39973401 Blast Desc: conserved [Magnaporthe grisea 70-15] gi|145017874|gb|EDK02153.1| conserved [Magnaporthe grisea 70-15]
  misc_feature (13)..(264): NCBI GI: 116197589 Blast Desc: conserved [Chaetomium globosum CBS 148.51] gi|88178229|gb|EAQ85697.1| conserved [Chaetomium globosum CBS 148.51]
  misc_feature (12)..(264): NCBI GI: 261351967 Blast Desc: proteasome subunit alpha type-6-B [Verticillium albo-atrum VaMs.102]
  misc_feature (12)..(264): NCBI GI: 85089251 Blast Desc: proteasome subunit alpha type 6 [Neurospora crassa OR74A] gi|28919181|gb|EAA28671.1| proteasome subunit alpha type 6 [Neurospora crassa OR74A]
  misc_feature (13)..(264): NCBI GI: 171694447 Blast Desc: protein product [Podospora anserina] gi|170947172|emb|CAP73977.1| protein product [Podospora anserina]
  misc_feature (14)..(264): NCBI GI: 256732056 Blast Desc: [Nectria haematococca mpVI 77-13-4]
  misc_feature (12)..(264): NCBI GI: 154296309 Blast Desc: conserved [Botryotinia fuckeliana B05.10] gi|156055752|ref|XP_001593800.1| conserved [Sclerotinia sclerotiorum 1980] gi|150843439|gb|EDN18632.1| conserved B05.10]
  misc_feature (14)..(264): NCBI GI: 46137479 Blast Desc: FG10255.1 [Gibberella zeae PH-1]
  misc_feature (12)..(264): NCBI GI: 261194120 Blast Desc: proteasome component C7-alpha [Ajellomyces dermatitidis SLH14081] gi|239588479|gb|EEQ71122.1| proteasome component C7-alpha [Ajellomyces dermatitidis SLH14081] proteasome
  misc_feature (12)..(264): NCBI GI: 225681671 Blast Desc: proteasome subunit alpha type-6 [Paracoccidioides brasiliensis Pb03]
  misc_feature (16)..(264): SWISSPROT Homolog: EC 3.4.25.1 Proteasome endopeptidase complex
MSGEILTFLFDTGSAGYDRHITIFSEQGRLYQVEYAFKAITAANIMAIGVRGKDCAVVLSQKKVPDKLIDPSSVSHIFQISPSVGCVMTGSIADARAFAQRAQGEAAEFRYKYGYEMPCDVLAKRLANISQVYTQRAYMRPYGVATTLISLDAEVGPQLFKCDPAGYYVGYKGTAAGPKQQEALNHLEKKLKSKDHAEGNWEEVVELAITTLSTVLSMDFKKGEIEIGIVGGPRADGKEGTDPAFRTLTEEEIDDRLQAIAEKD

SEQ ID NO: 39965 - DNA, 1443 bp, Muscodor strobelii; identical to SEQ ID NO: 39962
  misc_feature: SGI EST ID NO. CUFF.96561.0
  misc_feature: Variant of the nucleotide sequence at SEQ ID NO 39963

SEQ ID NO: 39966 - DNA, 672 bp, Muscodor strobelii
  misc_feature: SGI cDNA ID NO. 573921
  misc_feature: Encodes the peptide sequence at SEQ ID NO 39967
atgctgtcagatatcaaaaagcttctacaaaaacaacttgcgctcgtacaatgtccagcgcaaagactgttccgatcacaaggcagcagagatcacacaagagcactgttttcgctgaccgtgactccagtcaacgactatcggacagctcgagtcgccgacgtactctccgactttcgaacacttcagtattacatcgccgcggcacctacggaaccactctatagcgaagactattatacggaaggctgggcagcgttgcgacaatgcgccctggatggccaacatattcttaactgcgcagcggatgtcacagtacctcaggcacgaggcggcgaagaggagcagtcaaaggcagaactcaagcaagtcttgctggatgcctatgcccgaagacatgaaggccagaagatatacttgcggcaagcagcagctcagcgatgggttgaataccgtgaggcaactctacaagggcaacgacctagttcctcgagccggagggcattacgagcatgcgatgagcaacttcgaaatgagcttttacagatcacagacgaagtcatatacgcggaactccaaactcaagatatgacaatgggccgctggacggccgaagatccgagtctgcgagctgtacaacgatgggtgcgagcacggcctcaaaccacctga

SEQ ID NO: 39967 - protein, 223 aa, Muscodor strobelii
  misc_feature: SGI Peptide ID NO. 573921
  misc_feature (43)..(219): NCBI GI: 171694445 Blast Desc: protein product [Podospora anserina] gi|170947171|emb|CAP73976.1| protein product [Podospora anserina]
  misc_feature (44)..(219): NCBI GI: 116197585 Blast Desc: CHGG_06948 [Chaetomium globosum CBS 148.51] gi|88178227|gb|EAQ85695.1| CHGG_06948 [Chaetomium globosum CBS 148.51]
  misc_feature (44)..(219): NCBI GI: 261351968 Blast Desc: conserved [Verticillium albo-atrum VaMs.102]
  misc_feature (44)..(219): NCBI GI: 154296307 Blast Desc: BC1G_12980 [Botryotinia fuckeliana B05.10] gi|150843438|gb|EDN18631.1| BC1G_12980 [Botryotinia fuckeliana B05.10]
  misc_feature (44)..(219): NCBI GI: 156055750 Blast Desc: SS1G_05227 [Sclerotinia sclerotiorum 1980] gi|154703011|gb|EDO02750.1| SS1G_05227 [Sclerotinia sclerotiorum 1980]
  misc_feature (54)..(219): NCBI GI: 256732055 Blast Desc: [Nectria haematococca mpVI 77-13-4]
  misc_feature (44)..(222): NCBI GI: 85099463 Blast Desc: NCU08972 [Neurospora crassa OR74A] gi|28922318|gb|EAA31558.1| conserved [Neurospora crassa OR74A]
  misc_feature (67)..(219): NCBI GI: 46137477 Blast Desc: FG10254.1 [Gibberella zeae PH-1]
  misc_feature (54)..(219): NCBI GI: 39973403 Blast Desc: MGG_01152 [Magnaporthe grisea 70-15] gi|145017875|gb|EDK02154.1| MGG_01152 [Magnaporthe grisea 70-15]
  misc_feature (43)..(223): NCBI GI: 154284426 Blast Desc: [Ajellomyces capsulatus NAm1] gi|150406649|gb|EDN02190.1| [Ajellomyces capsulatus NAm1]
MLSDIKKLLQKQLALVQCPAQRLFRSQGSRDHTRALFSLTVTPVNDYRTARVADVLSDFRTLQYYIAAAPTEPLYSEDYYTEGWAALRQCALDGQHILNCAADVTVPQARGGEEEQSKAELKQVLLDAYARRHEGQKIYLRQAAAQRWVEYREATLQGQRPSSSSRRALRACDEQLRNELLQITDEVIYAELQTQDMTMGRWTAEDPSLRAVQRWVRARPQTT

SEQ ID NO: 39968 - DNA, 795 bp, Muscodor strobelii
  misc_feature: SGI cDNA ID NO. 573922
  misc_feature: Encodes the peptide sequence at SEQ ID NO 39969
atggcgccagaatctacatgcaaagtctgcgaggatcctcttattgtcgaagtcgaggatgaggcggagactcagggcgctgatccgcgtacagtcccagatgatttggaactcagatgcggctgccattttcattggcagtgcctcttagactcatcctccgaggttgccatatcattgaaatgtccgtcttgcgatagcttattggccgagaacctcggcggaccgagttctacaaaccaattcctactaaccactgccggagtctccatcagaactagatacaccaatgaaggtggtgtacaggatgatttggatatactgcctgccatcactgaggaggcctatttggaagccaatccgcaggcacggccggcaagggcattccacacgatgtgtggcgaaggtgatatcgacggtatagtcgatctgctccgtgacgtggaccagggcgaaggagatgccgatgcgttctccgtttccaatatcattcgttatcaggatcctctttcagacatgaagagcggtcttcacctagccgtggaacagcagaaggaggaagttgtttggctgttgctgtggattgcatcaactctacgcacagacatcttcccccgccctctccgggagatcgcaacagcaatggggctagagcggccgaatacttctctaactgaggatatccgtgctctgcaggatacccggggtcgcacagcggagaccctcgcggcaggaaatgaagacacttgggctacgatcctagagagtggtgtacttcgacccagcgtatcatga

SEQ ID NO: 39969 - protein, 264 aa, Muscodor strobelii
  misc_feature: SGI Peptide ID NO. 573922
  misc_feature (5)..(259): NCBI GI: 256732013 Blast Desc: NECHADRAFT_104387 [Nectria haematococca mpVI 77-13-4]
  misc_feature (5)..(259): NCBI GI: 46136691 Blast Desc: FG09861.1 [Gibberella zeae PH-1]
  misc_feature (7)..(261): NCBI GI: 261358500 Blast Desc: conserved [Verticillium albo-atrum VaMs.102]
  misc_feature (5)..(259): NCBI GI: 145603095 Blast Desc: MGG_13816 [Magnaporthe grisea 70-15] gi|145011415|gb|EDJ96071.1| MGG_13816 [Magnaporthe grisea 70-15]
  misc_feature (5)..(255): NCBI GI: 171677867 Blast Desc: protein product [Podospora anserina] gi|170937002|emb|CAP61660.1| protein product [Podospora anserina]
  misc_feature (5)..(259): NCBI GI: 85080633 Blast Desc: NCU03993 [Neurospora crassa OR74A] gi|28917647|gb|EAA27342.1| [Neurospora crassa OR74A]
  misc_feature (6)..(259): NCBI GI: 116201491 Blast Desc: CHGG_08630 [Chaetomium globosum CBS 148.51] gi|88177148|gb|EAQ84616.1| CHGG_08630 [Chaetomium globosum CBS 148.51]
  misc_feature (5)..(250): NCBI GI: 189191888 Blast Desc: conserved [Pyrenophora tritici-repentis Pt-1C-BFP] gi|187973889|gb|EDU41388.1| conserved [Pyrenophora tritici-repentis Pt-1C-BFP]
  misc_feature (132)..(243): NCBI GI: 156043177 Blast Desc: SS1G_10591 [Sclerotinia sclerotiorum 1980] gi|154694979|gb|EDN94717.1| SS1G_10591 [Sclerotinia sclerotiorum 1980]
  misc_feature (132)..(243): NCBI GI: 154310088 Blast Desc: BC1G_06964 [Botryotinia fuckeliana B05.10] gi|150851525|gb|EDN26718.1| BC1G_06964 [Botryotinia fuckeliana B05.10]
MAPESTCKVCEDPLIVEVEDEAETQGADPRTVPDDLELRCGCHFHWQCLLDSSSEVAISLKCPSCDSLLAENLGGPSSTNQFLLTTAGVSIRTRYTNEGGVQDDLDILPAITEEAYLEANPQARPARAFHTMCGEGDIDGIVDLLRDVDQGEGDADAFSVSNIIRYQDPLSDMKSGLHLAVEQQKEEVVWLLLWIASTLRTDIFPRPLREIATAMGLERPNTSLTEDIRALQDTRGRTAETLAAGNEDTWATILESGVLRPSVS

SEQ ID NO: 39970 - DNA, 2207 bp, Muscodor strobelii
  misc_feature: SGI EST ID NO. CUFF.96546.0
  misc_feature: Variant of the nucleotide sequence at SEQ ID NO 39968
gaaaattttgtgcacgaaaatatcttcgtcgtgattctccagaaagacagtagatcccaaaaaaggaagcattgcctcgtcattcagacatcactagtcatacgcagcagcacattacctgctgaaagatacatatctcacactggtagtgaggcctccgctctccgcccaggtgatcgatcaactaacgcgcgtcggtaagtccgagtaacacacatctccgtcatatctccaacaacaccgccgtcttctttgtatcctgcgtcacaacacctccttagaccgtggatacactcggatggcgtagaacaacaatgagcaatcataccgtcctcacaagccaatcctcagtcattcttgacttaggctgacccatctactcaccatgatggagcagcgcgcgtttcggcccctggactacatctctcgttgatcatcatttttgggattgtcctgatttggcattgatcagtgaagcctccttcccgagcaatggcgccagaatctacatgcaaagtctgcgaggatcctcttattgtcgaagtcgaggatgaggcggagactcagggcgctgatccgcgtacagtcccagatgatttggaactcagatgcggctgccattttcattggcagtgcctcttagactcatcctccgaggttgccatatcattgaaatgtccgtcttgcgatagcttattggccgagaacctcggcggaccgagttctacaaaccaattcctactaaccactgccggagtctccatcagaactagatacaccaatgaaggtggtgtacaggatgatttggatatactgcctgccatcactgaggaggcctatttggaagccaatccgcaggcacggccggcaagggcattccacacgatgtgtggcgaaggtgatatcgacggtatagtcgatctgctccgtgacgtggaccagggcgaaggagatgccgatgcgttctccgtttccaatatcattcgttatcaggatcctctttcagacatgaagagcggtcttcacctagccgtggaacagcagaaggaggaagttgtttggctgttgctgtggattgcatcaactctacgcacagacatcttcccccgccctctccgggagatcgcaacagcaatggggctagagcggccgaatacttctctaactgaggatatccgtgctctgcaggatacccggggtcgcacagcggagaccctcgcggcaggaaatgaagacacttgggctacgatcctagagagtggtgtacttcgacccagcgtatcatgatcaattgtgacttcggaatacgcattattttgggcacgccggatttatcagatatcgaccgctcaagggttctgactgagccgagagcggactccactgctactgtctatcaagacaatatctgcatggacgcgcatctagagctagacacctaatggccaagagtactaccgatcccacttatcctgcactgccctttttcatcgcatttcgatggtatcgccgtggtcatatctctcgaattgcgccaatcgctatggagggtaccggcttcaccaaacgagcaacccttgaacatgtaggaaagccgattcaagacgtgtacatgccgtattgtaagcattgtcatggagtgttcgtgcacaatcgtgctttttgagacagttcatctgcatgcgaccctatgaaatctgacaggaacagtaataattatcccggtcgtggagccccggctttctcccaagacatgtgaataaacccttgctattttctatgcgatgctttctccttcctcacatacaaacacctttaatgctcctactctcgtctgccgaacttcatgatctcgggttcttgcggtgcgcagcaaggggggttatggcgtttctagaatcgaaacagttcaccacacgcaaggacacaatcctctgtagcttaaatccttcttcatgatagcaagtctacgtcgctacatcgagggccatgaagcgaccaagccgaaggaagctctccaaaatcctttaccaattggctttgatgtaccctgcgcgccacatggaggcacagtcttcatcacaatggccttgtccgtttcattcactttcagacatcatccattgcccctgcgcagtatcccggccgagttctacggattagagtggaggacatgcaggagaactctccgctttccaccacgcttt

SEQ ID NO: 39971 - DNA, 1113 bp, Muscodor strobelii
  misc_feature: SGI cDNA ID NO. 573923
  misc_feature: Elevated expression when VOC is produced
  misc_feature: Encodes the peptide sequence at SEQ ID NO 39972
atggaacgtgggcggcctaggaaacgatctgatggcacaccaattggtctatctcataagcgtaatgaatctaagcgaagcttgagtgctgagaggagggcatttgagtatctacctaagggttacaagcccaaagaggcgattaagacgatggaacaggctgaggtggcttatttgcagaaacaggctcttggacaagctgctcgctttgaggttcttcgaaaagaagatgttgagactctttcgaaggaacttcgacatctcgatgaaaggactgagtatcttcgacgcacttatgcttcactccgcgccggtcgtcgcaatttacagtcccgagtttgccaatatctcaggtcacctcgggttgccaaatttagttacgactctatactcaagcaggaggagactctcgcggagcttgacgcttcgattgatgactggggcaataaactcgaacatgctgaaaatcgtcgcactcgtgttaggcagaagcttctggagcatgtggccgccgctgccacacttgccatcgcagttggctctaccgccgtttccgatactactcagcatagaatcggcgttaaaccgcagcctgaggctatcgatgtttcaacaccgccaagaagcccggtgaaaggtgcgacattctttcaatgctcgtctccgtcgccaacaacttcgcctcagcgtgtcgtcgctcgggtcccatcggcaatcatcgaagaagatgaggccaagtcgcgtcgtagtcaattaagtcccgatgtccagactacactggcgcgaatggaaagcattcgtatctacgcggacagtgacgtctatgctttgttggaagacgtcgagaccgaattcactaggctcagtgaaggtgtctccgccaccgattcggctacacagaaaccaagcaagagtggccggactgttctgcaacgtgcccgaagctacgatctcctgaatggccgctcgaacgcctcacaaggactttacaaattgtcaccgttatcccctgccgctccttcgcccccaatgaaaaactcaccaactcagagtggtgatgtgttcctctcctctgccgtcttccaaccccaacataccactgtcacggcatag

SEQ ID NO: 39972 - protein, 370 aa, Muscodor strobelii
  misc_feature: SGI Peptide ID NO. 573923
  misc_feature (1)..(363): NCBI GI: 39960914 Blast Desc: MGG_09484 [Magnaporthe grisea 70-15] gi|145010980|gb|EDJ95636.1| MGG_09484 [Magnaporthe grisea 70-15]
  misc_feature (1)..(288): NCBI GI: 171693847 Blast Desc: protein product [Podospora anserina] gi|170946872|emb|CAP73676.1| protein product [Podospora anserina]
  misc_feature (2)..(363): NCBI GI: 256731752 Blast Desc: NECHADRAFT_80448 [Nectria haematococca mpVI 77-13-4]
  misc_feature (1)..(289): NCBI GI: 256720230 Blast Desc: NECHADRAFT_56263 [Nectria haematococca mpVI 77-13-4]
  misc_feature (1)..(319): NCBI GI: 116197949 Blast Desc: CHGG_07130 [Chaetomium globosum CBS 148.51] gi|88178409|gb|EAQ85877.1| CHGG_07130 [Chaetomium globosum CBS 148.51]
  misc_feature (1)..(290): NCBI GI: 154302794 Blast Desc: BC1G_09512 [Botryotinia fuckeliana B05.10] gi|150855259|gb|EDN30451.1| BC1G_09512 [Botryotinia fuckeliana B05.10]
  misc_feature (1)..(175): NCBI GI: 261352002 Blast Desc: conserved [Verticillium albo-atrum VaMs.102]
  misc_feature (1)..(296): NCBI GI: 156056316 Blast Desc: SS1G_05511 [Sclerotinia sclerotiorum 1980] gi|154703294|gb|EDO03033.1| SS1G_05511 [Sclerotinia sclerotiorum 1980]
  misc_feature (1)..(363): NCBI GI: 85098738 Blast Desc: NCU06731 [Neurospora crassa OR74A] gi|28922172|gb|EAA31423.1| [Neurospora crassa OR74A] gi|28950287|emb|CAD71255.1| [Neurospora crassa]
  misc_feature (34)..(300): NCBI GI: 226279643 Blast Desc: conserved [Paracoccidioides brasiliensis Pb01]
  misc_feature: Useful for introducing or modulating the production of volatile compounds
MERGRPRKRSDGTPIGLSHKRNESKRSLSAERRAFEYLPKGYKPKEAIKTMEQAEVAYLQKQALGQAARFEVLRKEDVETLSKELRHLDERTEYLRRTYASLRAGRRNLQSRVCQYLRSPRVAKFSYDSILKQEETLAELDASIDDWGNKLEHAENRRTRVRQKLLEHVAAAATLAIAVGSTAVSDTTQHRIGVKPQPEAIDVSTPPRSPVKGATFFQCSSPSPTTSPQRVVARVPSAIIEEDEAKSRRSQLSPDVQTTLARMESIRIYADSDVYALLEDVETEFTRLSEGVSATDSATQKPSKSGRTVLQRARSYDLLNGRSNASQGLYKLSPLSPAAPSPPMKNSPTQSGDVFLSSAVFQPQHTTVTA

SEQ ID NO: 39973 - DNA, 3227 bp, Muscodor strobelii
  misc_feature: SGI EST ID NO. CUFF.96580.0
  misc_feature: Variant of the nucleotide sequence at SEQ ID NO 39971
tgatgtgcgatgcacatggtttgttctatatctcgggtattaagtgcaagcatattctgcagcgcgagttctcttctctcctccacggccaagctatacgtctatcttctatacattcgactattaagtgtttgcatcccccttgtactggattcgtctcatctctaggcgagagccaagccgtgccttatctttggtaacgcttgattcaattcaccttcgtttcttggaccagcatatatattatcaacttaatcgtcatatttgccaacctatcatttcctgttgcgaagtctttatccaggttccttgataatagtcccgtttcatttgtttccgcggtccacgatctgcttgcattgagtgccctccggtaatggctcacatagcagcttgcatgatagacagcgatggcgaaacaggtagcctcagaagctatatagcaaacagcttctctgcgaaagcatctacagactcgctaggatcggtttattctgttgatgagaagaaaccattcacttggagaatgcagaaccaagaaccacggaaataccagttgtttccgaaagagaaacaactaccatccgtgacagcgcagaagcagcttgagatagaccaagcttatgctttgacaatgaatcagtctccagaaaaattagacaagtcattgctatccaatggacttcgactacggatcaaagaacacaatttgacccgtaggcggaaggtgagcgttcctgagctggggcctatgacaactgtgcaagaggtgtcaatggattctccaacgatacctgggcgcccggcacttcatgagcgttctataagtactcccgtgaatacgttgagggaacctttacagctggaatccaggaacggcgcaggactctcaggctcggttccaaaagatagctccgcgtcactaagaagacaagctcctctatctcccaaggacctggcgcctcttacaataccaaatcatatcaccggagcactgccggcacttgcacgaaaaatatcgctcggccggttgagatcaggaaacaatcagcaagatcaaaatggccggattcatcgcgtagacgagtctcccaaagctcggacccctttcacaccttttacaccttccactgcctcagggtcactcacaacgcccaggtcagcaacaacatacatgacggcctcaacgattccaacacctgtgtcggcgccagctgagtcaagacagtcgcctaccccttgggagaaaccaaccgccgctacgaacgggtcgctgccccagtcttccaccgatcatattacagctccgaaaccagagttacgtagtgcgtcttccatgtcccacaggaggggacaatcagaatccggaagcattatggaacgtgggcggcctaggaaacgatctgatggcacaccaattggtctatctcataagcgtaatgaatctaagcgaagcttgagtgctgagaggagggcatttgagtatctacctaagggttacaagcccaaagaggcgattaagacgatggaacaggctgaggtggcttatttgcagaaacaggctcttggacaagctgctcgctttgaggttcttcgaaaagaagatgttgagactctttcgaaggaacttcgacatctcgatgaaaggactgagtatcttcgacgcacttatgcttcactccgcgccggtcgtcgcaatttacagtcccgagtttgccaatatctcaggtcacctcgggttgccaaatttagttacgactctatactcaagcaggaggagactctcgcggagcttgacgcttcgattgatgactggggcaataaactcgaacatgctgaaaatcgtcgcactcgtgttaggcagaagcttctggagcatgtggccgccgctgccacacttgccatcgcagttggctctaccgccgtttccgatactactcagcatagaatcggcgttaaaccgcagcctgaggctatcgatgtttcaacaccgccaagaagcccggtgaaaggtgcgacattctttcaatgctcgtctccgtcgccaacaacttcgcctcagcgtgtcgtcgctcgggtcccatcggcaatcatcgaagaagatgaggccaagtcgcgtcgtagtcaattaagtcccgatgtccagactacactggcgcgaatggaaagcattcgtatctacgcggacagtgacgtctatgctttgttggaagacgtcgagaccgaattcactaggctcagtgaaggtgtctccgccaccgattcggctacacagaaaccaagcaagagtggccggactgttctgcaacgtgcccgaagctacgatctcctgaatggccgctcgaacgcctcacaaggactttacaaattgtcaccgttatcccctgccgctccttcgcccccaatgaaaaactcaccaactcagagtggtgatgtgttcctctcctctgccgtcttccaaccccaacataccactgtcacggcatagtcgataacgataccaactactactcaacatgcataaaacttaattaacggcctgtttcacgaaaaattgcattcgccggatcattcgcatcatcattcattatatatcacgatccatatcgtccatgattcacggcctacagacacattatgtctcacatatgtcaatcacatcaattccagcattagtcgcgcatcatcatttcaacatcattccaacatattagtgtagcttttcattcatttcaccgatcctgtatgaacatggtagtatatcatgtaggagttggaccttcattctacttctgtttaactcatcgatcgacaaacatgtacaagttcgacgactgaacggcagccaagatacccagtgcgttaggtaccgtcatgtcacagcattcgcaacggccgagctcgaaatcaccatacccataacccctttacacaacaaaagttcctttcctctcctgtattcatccgtcattgtccgttactacaacatactagagcatgtttggcaaccactcccttgcataacgtagctcatccacaccatagccaataagaaactgcgtactatcataacatccttctatgtgttgagcattccattattgcaatcctgtcccgctgtcaatatgtcactgccaccatcatcagtcacatagacataagatcgacaaattgtgaactgtagctgcccatcgtgtaatgcaactcaaaattgcacttattccaag

SEQ ID NO: 39974 - DNA, 1806 bp, Muscodor strobelii
  misc_feature: SGI cDNA ID NO. 573924
  misc_feature: Encodes the peptide sequence at SEQ ID NO 39975
atggcaccgcgtgatcccaacaccctcgccaactatggcgaatggctcacaaaacacaccacggtcaacttcaacgtgaacttcgagaaacaacgtctcgagggatccgttttgctagaattggaatctttgaccgacaggcagagccaggagatcatcctcgacacgaaccatctgtcagtgttgtcggttaagcgtgattcctccgacttgaaatgggcactgaaagaccggattgagccgtacggctcgccccttcacgtatctgtacccgacggtgtgtcacagggagatgtcgtaaagctagacattgctttagaaaccaccaaagactgcgtaggcctccagtggatgactcccgcccagactggaaacaagaagcacccctatgtatactctcagtgccaggcaattcttgctcgctccatcttcccgtgccaggatactcctgacgtcaagtctacattcagcttcaacatcacctcaccgctacccgtggtggcgagtggtgtgcctgccactaagaatggcgataaggtatttcgatttgagcaaaacgtgcctattccctcgtatctttttgctttggcctcaggagacatcgagtctgcccctattggcaagcgctcagttgtcgccacgggaccagaggctttggaagaagcaaaatgggagttagagaacgatatggacaagtttctagaggttgcagagaaactcgtcttcgattaccagtggggcccatacaatgtcctagtactgcctccaagtttcgcctatggtgggatggaaaacccgatcttcacctttgctactcccacgattatcagcggtgatcgtcagaatgttgacgtaatcgctcacgagctgagccactcctggagcggtaatctggtcggatgcgcttcgtgggagcacttctggctcaacgaggggtggactacttatctagagcgtcgaattggcgccgtgatacatggtgctccccaattcgacttctctgccatcatcggttggtataagctagaggaatcagttgagctgttcggggccgatcatgaattcacgaaactcatcattaatcacaagggcgtggaccctgaagacgcattcagctccatcccatacgagaagggcttccacttcttgtactacctcgataacttagttggccgtgagcacttcgacaaattcataccacactacttcaagacctgggcacgtaaatccctcgactcttacgaattcaagcagacattcctggacttctttgagagctatggaaacgaggaaatcaaacagaaaattaccacaatcccttgggaagagcgattttacacacctggcttaccccccaaacctgagttcgacacggcgtatgtcgatacctgcatggcgctggcggagaagtggaagcaagcagactacgagcccagcatcaaggacatcggatccttcaccgcgaatcaagtgctagtattcttacaggccgtgcagaacttcgagccgcccctgagcgccgaacgatctcatctattaggaaagacttataacatcagctcttcaaagaatgttgagcttaaggcggcttactatcttatcgctttgcaagctacagaccgcaaggagcttgacggcgtggtagatctattaggatctgtcggtcgtatgaagttcgtacgacccctctatcgagagcttgtgaaagtcgacagagacctcgctgtgaagacgtttgaggcgaacaagaatttttacccatcgacaaccaaaggccagctgactaaggatttggggttgaagtag

SEQ ID NO: 39975 - protein, 601 aa, Muscodor strobelii
  misc_feature: SGI Peptide ID NO. 573924
  misc_feature (459)..(598): Pfam Id: PF09127 Pfam Desc: Leukotriene A4 hydrolase, C-terminal
  misc_feature (16)..(379): Pfam Id: PF01433 Pfam Desc: Peptidase family M1
  misc_feature (19)..(379): Pfam Id: PF01433 Pfam Desc: Peptidase family M1
  misc_feature (2)..(600): NCBI GI: 46137345 Blast Desc: FG10188.1 [Gibberella zeae PH-1]
  misc_feature (1)..(600): NCBI GI: 39960895 Blast Desc: MGG_09481 [Magnaporthe grisea 70-15] gi|172044422|sp|A4QUC1.1|LKHA4_MAGGR RecName: Full=Leukotriene A-4 hydrolase; AltName: Full=Leukotriene A(4) hydrolase; grisea
  misc_feature (4)..(600): NCBI GI: 171693849 Blast Desc: protein product [Podospora anserina] gi|170946873|emb|CAP73677.1| protein product [Podospora anserina]
  misc_feature (1)..(600): NCBI GI: 85098741 Blast Desc: NCU06732 [Neurospora crassa OR74A] gi|74628780|sp|Q7S785.1|LKHA4_NEUCR RecName: Full=Leukotriene A-4 hydrolase; AltName: Full=Leukotriene A(4) hydrolase; Short=LTA-4
  misc_feature (1)..(600): NCBI GI: 116197955 Blast Desc: conserved [Chaetomium globosum CBS 148.51] gi|121781758|sp|Q2GY21.1|LKHA4_CHAGB RecName: Full=Leukotriene A-4 hydrolase; AltName: Full=Leukotriene A(4) hydrolase; globosum
  misc_feature (3)..(598): NCBI GI: 154302798 Blast Desc: BC1G_09514 [Botryotinia fuckeliana B05.10] gi|150855261|gb|EDN30453.1| BC1G_09514 [Botryotinia fuckeliana B05.10]
  misc_feature (3)..(598): NCBI GI: 172052498 Blast Desc: BC1G_09514 [Botryotinia fuckeliana B05.10] gi|150855261|gb|EDN30453.1| BC1G_09514 [Botryotinia fuckeliana B05.10]
  misc_feature (3)..(598): NCBI GI: 156056320 Blast Desc: SS1G_05513 [Sclerotinia sclerotiorum 1980] gi|171704394|sp|A7EJL9.1|LKHA4_SCLS1 RecName: Full=Leukotriene A-4 hydrolase; AltName: Full=Leukotriene A(4) hydrolase; 1980]
  misc_feature (3)..(598): NCBI GI: 172052502 Blast Desc: SS1G_05513 [Sclerotinia sclerotiorum 1980] gi|171704394|sp|A7EJL9.1|LKHA4_SCLS1 RecName: Full=Leukotriene A-4 hydrolase; AltName: Full=Leukotriene A(4) hydrolase; 1980]
  misc_feature (3)..(598): NCBI GI: 119480487 Blast Desc: leukotriene A4 hydrolase [Neosartorya fischeri NRRL 181] gi|171704483|sp|A1DG68.1|LKHA4_NEOFI RecName: Full=Leukotriene A-4 hydrolase; AltName: Full=Leukotriene A(4) A4
  misc_feature (1)..(600): SWISSPROT Homolog: EC 3.3.2.6 Leukotriene-A(4) hydrolase
MAPRDPNTLANYGEWLTKHTTVNFNVNFEKQRLEGSVLLELESLTDRQSQEIILDTNHLSVLSVKRDSSDLKWALKDRIEPYGSPLHVSVPDGVSQGDVVKLDIALETTKDCVGLQWMTPAQTGNKKHPYVYSQCQAILARSIFPCQDTPDVKSTFSFNITSPLPVVASGVPATKNGDKVFRFEQNVPIPSYLFALASGDIESAPIGKRSVVATGPEALEEAKWELENDMDKFLEVAEKLVFDYQWGPYNVLVLPPSFAYGGMENPIFTFATPTIISGDRQNVDVIAHELSHSWSGNLVGCASWEHFWLNEGWTTYLERRIGAVIHGAPQFDFSAIIGWYKLEESVELFGADHEFTKLIINHKGVDPEDAFSSIPYEKGFHFLYYLDNLVGREHFDKFIPHYFKTWARKSLDSYEFKQTFLDFFESYGNEEIKQKITTIPWEERFYTPGLPPKPEFDTAYVDTCMALAEKWKQADYEPSIKDIGSFTANQVLVFLQAVQNFEPPLSAERSHLLGKTYNISSSKNVELKAAYYLIALQATDRKELDGVVDLLGSVGRMKFVRPLYRELVKVDRDLAVKTFEANKNFYPSTTKGQLTKDLGLK

SEQ ID NO: 39976 - DNA, 2484 bp, Muscodor strobelii
  misc_feature: SGI EST ID NO. CUFF.96585.0
  misc_feature: Variant of the nucleotide sequence at SEQ ID NO 39974
cgggttgcgacggaaacttaggtcaggttgacatcaatactagctcaattgggcaggccatacagagataaagtgaagccagttatatgctgtcctcagtgcatccgttcctatgcggggaagtaagagcctcatgaacggcagcgcgcttttcagagtcattcacatcacctctcgaagtgcgccatttacctctctattacccgcagcatcattcgcacccctgagacggttcagccagtgtgtacgaaagatggcaccgcgtgatcccaacaccctcgccaactatggcgaatggctcacaaaacacaccacggtcaacttcaacgtgaacttcgagaaacaacgtctcgagggatccgttttgctagaattggaatctttgaccgacaggcagagccaggagatcatcctcgacacgaaccatctgtcagtgttgtcggttaagcgtgattcctccgacttgaaatgggcactgaaagaccggattgagccgtacggctcgccccttcacgtatctgtacccgacggtgtgtcacagggagatgtcgtaaagctagacattgctttagaaaccaccaaagactgcgtaggcctccagtggatgactcccgcccagactggaaacaagaagcacccctatgtatactctcagtgccaggcaattcttgctcgctccatcttcccgtgccaggatactcctgacgtcaagtctacattcagcttcaacatcacctcaccgctacccgtggtggcgagtggtgtgcctgccactaagaatggcgataaggtatttcgatttgagcaaaacgtgcctattccctcgtatctttttgctttggcctcaggagacatcgagtctgcccctattggcaagcgctcagttgtcgccacgggaccagaggctttggaagaagcaaaatgggagttagagaacgatatggacaagtttctagaggttgcagagaaactcgtcttcgattaccagtggggcccatacaatgtcctagtactgcctccaagtttcgcctatggtgggatggaaaacccgatcttcacctttgctactcccacgattatcagcggtgatcgtcagaatgttgacgtaatcgctcacgagctgagccactcctggagcggtaatctggtcggatgcgcttcgtgggagcacttctggctcaacgaggggtggactacttatctagagcgtcgaattggcgccgtgatacatggtgctccccaattcgacttctctgccatcatcggttggtataagctagaggaatcagttgagctgttcggggccgatcatgaattcacgaaactcatcattaatcacaagggcgtggaccctgaagacgcattcagctccatcccatacgagaagggcttccacttcttgtactacctcgataacttagttggccgtgagcacttcgacaaattcataccacactacttcaagacctgggcacgtaaatccctcgactcttacgaattcaagcagacattcctggacttctttgagagctatggaaacgaggaaatcaaacagaaaattaccacaatcccttgggaagagcgattttacacacctggcttaccccccaaacctgagttcgacacggcgtatgtcgatacctgcatggcgctggcggagaagtggaagcaagcagactacgagcccagcatcaaggacatcggatccttcaccgcgaatcaagtgctagtattcttacaggccgtgcagaacttcgagccgcccctgagcgccgaacgatctcatctattaggaaagacttataacatcagctcttcaaagaatgttgagcttaaggcggcttactatcttatcgctttgcaagctacagaccgcaaggagcttgacggcgtggtagatctattaggatctgtcggtcgtatgaagttcgtacgacccctctatcgagagcttgtgaaagtcgacagagacctcgctgtgaagacgtttgaggcgaacaagaatttttacccatcgacaaccaaaggccagctgactaaggatttggggttgaagtagtcatatcgtggcgaagagctaaaccagtatccccaaataaatctgcacccgtaaaaagcgttgaaagggagcatggcatggtatgcattggctggtaagcatatataacgggtaaaagcagtgtccctcgcgaaagtagtcgcgacctgcccgaacggcgcatggtattatagctataagtgcatctcaaacacacccagctagttcatctccgatctcaagagcattggacgagtgccatcaagtagtacgtgactatttctggcgtctatacgacagctaagtaagcgtgaaatggacgaccctcatagaagcgaatggcttaagatgtaagacgtcctctgacggtctgaatctcgggtgggtgttcgggtcttctagtcctagtgtgttcaacattcagatattgcaacccgccacttgag

SEQ ID NO: 39977 - DNA, 5262 bp, Muscodor strobelii
  misc_feature: SGI cDNA ID NO. 573925
  misc_feature: Encodes the peptide sequence at SEQ ID NO 39978
atggctccagctgggggcggaaacatcaaggtggtggtgagatgtcgtcccttcaacgggagagaaatcgacaggggggcaaaatgtatcgtggatatgaaagataaccaaacggtgctcacgccaccagatcatggtgcgcatagtggcaagggcccgaaagatcttgcgctcaagaactttgccttcgatcgatcctactggtccttcaacaaagatgaccccaactacgccggccaggacaacctgcacaacgatcttggaaagcctcttttggacaatgcatttcaaggatacaacaactgtatctttgcttacggacagactggctccggaaagtcctactcgatgatggggtatggtaaagatacgggtatcatccccaagatttgtcaggatatgtttgagcggataggacagttgcaaggggacaagaatacacggtgcacagtagaggtctcgtacctagagatctataacgaacgggtgcgcgatctcttgaacccatcgacgaaaggcaatctcaaagtccgcgagcatccatcgaccggtccgtatgtcgaagacctggcgaagctcgtggtgggaagcttccaggagattgagaacttgatggacgagggcaacaaagcaagaacggtggcagccacgaacatgaacgagacatcgagtcgaagtcacgccgttttcacccttattctgacacaaaagtcattcgacacggacaccaaaatggagttggaaaagcaggcgaagatcagtctcgtcgatcttgctggttccgagagagcaacgtccacaggtgctacaggtgcccgactcaaggagggtgctgaaatcaacaggtcgctctcaaccctcggccgtgtgatagcagcactggctgacctctccacggggaagaagaagaaaggagctgggggcaccgttccgtatcgagatagtgtcctcacatggcttctgaaagactcgctgggtggcaacagtatgacagctatgatagcggctattagtcccgccgatatcaactatgacgagacgttgagtaccttgcgttatgccgactcagccaaacgcatcaagaaccatgctgtcatcaacgaggatgccaatgcacgtatgataagagagctgaaggaagaattagctctgctgcgaaacaaactcggagggggaacggcgggtggcgtcggaggtgcgcctgtcccgcccgaagaggtgtatgccgaaggcacgcccttggagaagcagattgtcagcatcacgcaggctgatggcagcgtcaagaaggtctccaaggccgagattgcggagcagctcagccagagcgagaaactactcacagatctcaatcagacgtgggaagaaaagctcttgaagacggaagagatccacaaggaacgcgaggcggcattggaagagcttggaatcagcatcgagaaaggattcgttggcttgcacacaccgaagaagatgccacatttggtgaatttatccgacgatccgctcctcgcagagtgccttgtctacaatctaaaacctggcaagactacggttggcaacgtcgattcgaatgcggaacatcaagccaacatacgccttaatggcacgcgcatccttcacgaccactgttcattcgacaatggctcggatggtactgtcacgatcatcccaggcgaaggtgcttctatcatggtcaatggaaggcgcataacagagcccacccgactacattcagggcatcgcgtcattctcggagattttcacattttccgatttaaccatcctatggaagccaaagctgaacgagatgagaatagacaaagtctacttcgccaatctatcactgctacccagatagagaacttgggaagcgcatcgccacgtcctggccatgaacgttctgtaagcaaagctggctccgagtttgggagtagtcgtcccgattctcctgcccttaggaacggacgggattcagattggtcgtttgcccggcgcgaggctgctggcgcgattctcggaaccgataagaatcttcagagcctgacagacgaagaacttaatgcgcttttcgaggatgtacagcgtgccagggccgaacgcgttaacgaacgcgaaggtgatgatgacctagaatccaacatgtcatatccttttagagagaaatacatgtctacaggaacaatcgacaacttctcactcgatacggcgctcacgatgccttctacacccagaacaggtgaacctgatgagaggctgaaagacatccgagaaagcatgcagtcacagcttgaaaaacagaaagaagattttcaagatcaactgaaaagcgccgaagcggccaatgtggaagtcgaagaaatcaagaaagaaaaggacaggatggaggagaccctgattcaactcaaagccgacatggaaaaacagttgcaagtccaaaagaaagaatttgaagccaagatcgaaaagcttgatccactcaaacggcctaaggctaatccgaagctctcaggcgaggagattgtacgggcaaagaaggtcatttcacactggagaagtagacattatgtgcaaatggcagaagccgtacttcagcatgccgcggctctgaaagaagcccagatcatgagcgaagagctcggagagaacgtggtcttccagttcaccgtggtagatcagggtcatgctctgtgctcttcctatgacatggttttgaatgatgtgtcaaacgaggacgatgtcgcactcgagcacgcgtccaagccttgcgtaggtgttcgcgtagttgactacaagaacagcgtcgtccatttgtggagcttggataaacttcacacccgggttcgtcagatgcgccagatgcatcagtaccttgaccagccagaatattctcaacacttcaagcttgataatccgttcgttgaaggatgcatgccggaatattctctcgttggtgaggtcgatgtgccacttaaagctgtgttcgacagtcgagttcaagattttaccctcgacgtgctatccccccacacttctcatgtaatcggcatcatcaaagtctctcttgagccttcaagcgctcgggctccgtctagcaccttgaaatataacgtggtcatgcatgatatggttggattcgccgagcgagaagggacagacgtacacggtcagctcttcataccaggtgtctcggaaaatggagtgaccaccacccaaatgatcaaagatttcgatgaggagcccattcggttcgatagcgtgcatagtatgagcgttccccttaccagtgctcatgacatcagcttgagaatcgcgattttcgcaaaagtaaccgcaatgcatttggacaagcttctgagttgggatgaaatgcgagatgcttctcccggcgctgaaagcaaagctaaaggcgcccgtattagcgagtcgcaattctacaccgccgagaagcatgatttacttgcacgagtccagatcttggaaatgaatgaagaaggcgaatacatgcctgtagaagtaacgcagacgagcgaactcgatatcgggacattccaactacatcaaggccttcaaaggcgcattgctgtcaacttatcccacagctccggcgaggcattgccttgggaagatatttcctcgatgcgagtgggcaaggttcaaatcgtcgaccaggccggaaacagctctgacctagtatcaccgtccccagacatccccttgcgtctcggtgctaagcccagctttagagagaacgcgaacgggacgcgaagcgtgacaatctctggcatttgggattcgggttctcacaactcccttttacttgatcgagtaactgcggacaaacataaggtccaactgagtctctcttgggacattacttcggataatcttgcagagccaatgaagttctccacgaatttctattgccagattctggggcgaagttacgttcgtcaagcttcgatgctctcggcgctttggcagcatgtccgcatcgtccattcttcatcgtcaatcttctcattaggcttaaagccggcgcctgtcaagcatgctggtgatctgtggaggatgaatagccaacatgactacgtgaaaggcgaagaaaacctcactggctggacaccgaggggcgtttcgctaattgcagactacataacagcaaggaaaaagaaacgtcgcattggagagattggtgctgcacagctattcttgaagaagatcggtcttccggagcccaaaaccaagccgttggaggcagatgaacactctgaggatgagctatcacctataaaggcgcatgatgacgatgatgattcaatcaatgctctcttgaacgatactccacagacttcgcgtccaacaactccggagcaaggtgcagacgaaagtgctctgctggaaaatgcggaatcagagccaaagtcacaagacgccgaagccacggaaaccccaggtcctgccggggagaagctcgacaacaatcctgaggaggcgccggcagaagtacctcaagaggagccccaccaaaagcccgaagagcctgaatacgacgaagaagaaaccgcgacgctgacaaagtgccttgagctctggcgaaagttccccgatccttcgtttagcatactaagcccagcaaatacctcgccacccacaaacggtatagctcctgagtcaagcacgccaccgaaattgattgctacggttattcgcgtaccaaaaaacccctcagtcctcaagggaggttatctcttggtaccgaacaacgattcgaccaaatgggttaagagattcgttgagcttcgccgaccgtatctgcatattcacaacgccacggatggtgacgaggtcgctattgtcagcctccgtaattcaagagtcgacagccaacccgaaattttggcactgttcagtggtcatgacgatggacatggcgcggaaatgccaaccaatggcactagtagcgaagcgttccagccaggtcatcgacgcacgtcttccggacgagtagtctcttcgatttgggccgggtcccattcctcagccggtcctgggcttggcggcttgagcgagcgcttgcaagcgggtgtgttcgctgtctatggaacagacaacacttggctgtttgctgcccgcagcgagcgggataagctggattggattctccggattgaccagagttattattcaggaaacggcagtgctgctggtagcggtgccgtcagtccgcagcctcgacatcttgcatttggcgatgattga

SEQ ID NO: 39978 - protein, 1753 aa, Muscodor strobelii
  misc_feature: SGI Peptide ID NO. 573925
  misc_feature (517)..(586): Pfam Id: PF00498 Pfam Desc: FHA domain
  misc_feature (1578)..(1729): Pfam Id: PF00169 Pfam Desc: PH domain
  misc_feature (14)..(361): Pfam Id: PF00225 Pfam Desc: Kinesin motor domain
  misc_feature (1)..(1743): NCBI GI: 261352004 Blast Desc: kinesin heavy chain [Verticillium albo-atrum VaMs.102]
  misc_feature (1)..(1745): NCBI GI: 256732140 Blast Desc: [Nectria haematococca mpVI 77-13-4]
  misc_feature (5)..(1748): NCBI GI: 145605477 Blast Desc: MGG_09255 [Magnaporthe grisea 70-15] gi|145013298|gb|EDJ97939.1| MGG_09255 [Magnaporthe grisea 70-15]
  misc_feature (1)..(1745): NCBI GI: 46137347 Blast Desc: FG10189.1 [Gibberella zeae PH-1]
  misc_feature (8)..(1746): NCBI GI: 171693851 Blast Desc: protein product [Podospora anserina] gi|170946874|emb|CAP73678.1| protein product [Podospora anserina]
  misc_feature (8)..(1377): NCBI GI: 164424699 Blast Desc: NCU06733 [Neurospora crassa OR74A] gi|157070625|gb|EAA31425.2| NCU06733 [Neurospora crassa OR74A]
  misc_feature (1)..(1730): NCBI GI: 154304427 Blast Desc: BC1G_09089 [Botryotinia fuckeliana B05.10] gi|150854069|gb|EDN29261.1| BC1G_09089 [Botryotinia fuckeliana B05.10]
  misc_feature (33)..(1730): NCBI GI: 29421244 Blast Desc: kinesin [Botryotinia fuckeliana]
  misc_feature (33)..(1739): NCBI GI: 225554470 Blast Desc: kinesin family protein [Ajellomyces capsulatus G186AR]
  misc_feature (1)..(1737): NCBI GI: 240273506 Blast Desc: kinesin family protein [Ajellomyces capsulatus H143]
MAPAGGGNIKVVVRCRPFNGREIDRGAKCIVDMKDNQTVLTPPDHGAHSGKGPKDLALKNFAFDRSYWSFNKDDPNYAGQDNLHNDLGKPLLDNAFQGYNNCIFAYGQTGSGKSYSMMGYGKDTGIIPKICQDMFERIGQLQGDKNTRCTVEVSYLEIYNERVRDLLNPSTKGNLKVREHPSTGPYVEDLAKLVVGSFQEIENLMDEGNKARTVAATNMNETSSRSHAVFTLILTQKSFDTDTKMELEKQAKISLVDLAGSERATSTGATGARLKEGAEINRSLSTLGRVIAALADLSTGKKKKGAGGTVPYRDSVLTWLLKDSLGGNSMTAMIAAISPADINYDETLSTLRYADSAKRIKNHAVINEDANARMIRELKEELALLRNKLGGGTAGGVGGAPVPPEEVYAEGTPLEKQIVSITQADGSVKKVSKAEIAEQLSQSEKLLTDLNQTWEEKLLKTEEIHKEREAALEELGISIEKGFVGLHTPKKMPHLVNLSDDPLLAECLVYNLKPGKTTVGNVDSNAEHQANIRLNGTRILHDHCSFDNGSDGTVTIIPGEGASIMVNGRRITEPTRLHSGHRVILGDFHIFRFNHPMEAKAERDENRQSLLRQSITATQIENLGSASPRPGHERSVSKAGSEFGSSRPDSPALRNGRDSDWSFARREAAGAILGTDKNLQSLTDEELNALFEDVQRARAERVNEREGDDDLESNMSYPFREKYMSTGTIDNFSLDTALTMPSTPRTGEPDERLKDIRESMQSQLEKQKEDFQDQLKSAEAANVEVEEIKKEKDRMEETLIQLKADMEKQLQVQKKEFEAKIEKLDPLKRPKANPKLSGEEIVRAKKVISHWRSRHYVQMAEAVLQHAAALKEAQIMSEELGENVVFQFTVVDQGHALCSSYDMVLNDVSNEDDVALEHASKPCVGVRVVDYKNSVVHLWSLDKLHTRVRQMRQMHQYLDQPEYSQHFKLDNPFVEGCMPEYSLVGEVDVPLKAVFDSRVQDFTLDVLSPHTSHVIGIIKVSLEPSSARAPSSTLKYNVVMHDMVGFAEREGTDVHGQLFIPGVSENGVTTTQMIKDFDEEPIRFDSVHSMSVPLTSAHDISLRIAIFAKVTAMHLDKLLSWDEMRDASPGAESKAKGARISESQFYTAEKHDLLARVQILEMNEEGEYMPVEVTQTSELDIGTFQLHQGLQRRIAVNLSHSSGEALPWEDISSMRVGKVQIVDQAGNSSDLVSPSPDIPLRLGAKPSFRENANGTRSVTISGIWDSGSHNSLLLDRVTADKHKVQLSLSWDITSDNLAEPMKFSTNFYCQILGRSYVRQASMLSALWQHVRIVHSSSSIFSLGLKPAPVKHAGDLWRMNSQHDYVKGEENLTGWTPRGVSLIADYITARKKKRRIGEIGAAQLFLKKIGLPEPKTKPLEADEHSEDELSPIKAHDDDDDSINALLNDTPQTSRPTTPEQGADESALLENAESEPKSQDAEATETPGPAGEKLDNNPEEAPAEVPQEEPHQKPEEPEYDEEETATLTKCLELWRKFPDPSFSILSPANTSPPTNGIAPESSTPPKLIATVIRVPKNPSVLKGGYLLVPNNDSTKWVKRFVELRRPYLHIHNATDGDEVAIVSLRNSRVDSQPEILALFSGHDDGHGAEMPTNGTSSEAFQPGHRRTSSGRVVSSIWAGSHSSAGPGLGGLSERLQAGVFAVYGTDNTWLFAARSERDKLDWILRIDQSYYSGNGSAAGSGAVSPQPRHLAFGDD

SEQ ID NO: 39979 - DNA, 6553 bp, Muscodor strobelii
  misc_feature: SGI EST ID NO. CUFF.96624.0
  misc_feature: Variant of the nucleotide sequence at SEQ ID NO 39977
tggaaaatggctttgagaagcgagacacagctggccgataaagagaagtggatcgggagtgtgagtcttgacacgtgaagctgcgggtggtcattcgtcataatttggtatgacaggggactctccccaaagttgagtcgcgatccgcgtcttcgccaatttcgtagtcgctacccagtaattaatgctgctatgcaatttggttgttgacagcctggatctctgcaaaaatcctaagaagaccgcgaaagccacctcgcaatcgcccagacaacccgcacattcctcagggcaagtttgcgacgacacatcttcaacgcatcctttttgcgcctagccttgccgcccgctaggccagcacccgtggtgctaagctgtatcttgcatacccgatccataccgccacatcgcatcccaccgcaattttggtcgcccaagcccctgctcccaccgcagcctttcggcatactccctttatctcgaacgactcttttggctctattgtaccaaagctgcgtacatcagcggcatacttaccgagggttatgctctttggagagcggtgacggcgcaaagggctgggaatactgggcgaaatacgatttgcactggctatcgaccgatagctcaagattagacgacaacgacgacgacagctctacttcatcaaacttcaacgctggaacagctataacacctcgcatgctatcgcgactcaccccgcctgtcgcatattgcgatcctcgacgtatactctgcactggatctgactgaacttgaggggctccgtcctctgtccgcctgtcatggctccagctgggggcggaaacatcaaggtggtggtgagatgtcgtcccttcaacgggagagaaatcgacaggggggcaaaatgtatcgtggatatgaaagataaccaaacggtgctcacgccaccagatcatggtgcgcatagtggcaagggcccgaaagatcttgcgctcaagaactttgccttcgatcgatcctactggtccttcaacaaagatgaccccaactacgccggccaggacaacctgcacaacgatcttggaaagcctcttttggacaatgcatttcaaggatacaacaactgtatctttgcttacggacagactggctccggaaagtcctactcgatgatggggtatggtaaagatacgggtatcatccccaagatttgtcaggatatgtttgagcggataggacagttgcaaggggacaagaatacacggtgcacagtagaggtctcgtacctagagatctataacgaacgggtgcgcgatctcttgaacccatcgacgaaaggcaatctcaaagtccgcgagcatccatcgaccggtccgtatgtcgaagacctggcgaagctcgtggtgggaagcttccaggagattgagaacttgatggacgagggcaacaaagcaagaacggtggcagccacgaacatgaacgagacatcgagtcgaagtcacgccgttttcacccttattctgacacaaaagtcattcgacacggacaccaaaatggagttggaaaagcaggcgaagatcagtctcgtcgatcttgctggttccgagagagcaacgtccacaggtgctacaggtgcccgactcaaggagggtgctgaaatcaacaggtcgctctcaaccctcggccgtgtgatagcagcactggctgacctctccacggggaagaagaagaaaggagctgggggcaccgttccgtatcgagatagtgtcctcacatggcttctgaaagactcgctgggtggcaacagtatgacagctatgatagcggctattagtcccgccgatatcaactatgacgagacgttgagtaccttgcgttatgccgactcagccaaacgcatcaagaaccatgctgtcatcaacgaggatgccaatgcacgtatgataagagagctgaaggaagaattagctctgctgcgaaacaaactcggagggggaacggcgggtggcgtcggaggtgcgcctgtcccgcccgaagaggtgtatgccgaaggcacgcccttggagaagcagattgtcagcatcacgcaggctgatggcagcgtcaagaaggtctccaaggccgagattgcggagcagctcagccagagcgagaaactactcacagatctcaatcagacgtgggaagaaaagctcttgaagacggaagagatccacaaggaacgcgaggcggcattggaagagcttggaatcagcatcgagaaaggattcgttggcttgcacacaccgaagaagatgccacatttggtgaatttatccgacgatccgctcctcgcagagtgccttgtctacaatctaaaacctggcaagactacggttggcaacgtcgattcgaatgcggaacatcaagccaacatacgccttaatggcacgcgcatccttcacgaccactgttcattcgacaatggctcggatggtactgtcacgatcatcccaggcgaaggtgcttctatcatggtcaatggaaggcgcataacagagcccacccgactacattcagggcatcgcgtcattctcggagattttcacattttccgatttaaccatcctatggaagccaaagctgaacgagatgagaatagacaaagtctacttcgccaatctatcactgctacccagatagagaacttgggaagcgcatcgccacgtcctggccatgaacgttctgtaagcaaagctggctccgagtttgggagtagtcgtcccgattctcctgcccttaggaacggacgggattcagattggtcgtttgcccggcgcgaggctgctggcgcgattctcggaaccgataagaatcttcagagcctgacagacgaagaacttaatgcgcttttcgaggatgtacagcgtgccagggccgaacgcgttaacgaacgcgaaggtgatgatgacctagaatccaacatgtcatatccttttagagagaaatacatgtctacaggaacaatcgacaacttctcactcgatacggcgctcacgatgccttctacacccagaacaggtgaacctgatgagaggctgaaagacatccgagaaagcatgcagtcacagcttgaaaaacagaaagaagattttcaagatcaactgaaaagcgccgaagcggccaatgtggaagtcgaagaaatcaagaaagaaaaggacaggatggaggagaccctgattcaactcaaagccgacatggaaaaacagttgcaagtccaaaagaaagaatttgaagccaagatcgaaaagcttgatccactcaaacggcctaaggctaatccgaagctctcaggcgaggagattgtacgggcaaagaaggtcatttcacactggagaagtagacattatgtgcaaatggcagaagccgtacttcagcatgccgcggctctgaaagaagcccagatcatgagcgaagagctcggagagaacgtggtcttccagttcaccgtggtagatcagggtcatgctctgtgctcttcctatgacatggttttgaatgatgtgtcaaacgaggacgatgtcgcactcgagcacgcgtccaagccttgcgtaggtgttcgcgtagttgactacaagaacagcgtcgtccatttgtggagcttggataaacttcacacccgggttcgtcagatgcgccagatgcatcagtaccttgaccagccagaatattctcaacacttcaagcttgataatccgttcgttgaaggatgcatgccggaatattctctcgttggtgaggtcgatgtgccacttaaagctgtgttcgacagtcgagttcaagattttaccctcgacgtgctatccccccacacttctcatgtaatcggcatcatcaaagtctctcttgagccttcaagcgctcgggctccgtctagcaccttgaaatataacgtggtcatgcatgatatggttggattcgccgagcgagaagggacagacgtacacggtcagctcttcataccaggtgtctcggaaaatggagtgaccaccacccaaatgatcaaagatttcgatgaggagcccattcggttcgatagcgtgcatagtatgagcgttccccttaccagtgctcatgacatcagcttgagaatcgcgattttcgcaaaagtaaccgcaatgcatttggacaagcttctgagttgggatgaaatgcgagatgcttctcccggcgctgaaagcaaagctaaaggcgcccgtattagcgagtcgcaattctacaccgccgagaagcatgatttacttgcacgagtccagatcttggaaatgaatgaagaaggcgaatacatgcctgtagaagtaacgcagacgagcgaactcgatatcgggacattccaactacatcaaggccttcaaaggcgcattgctgtcaacttatcccacagctccggcgaggcattgccttgggaagatatttcctcgatgcgagtgggcaaggttcaaatcgtcgaccaggccggaaacagctctgacctagtatcaccgtccccagacatccccttgcgtctcggtgctaagcccagctttagagagaacgcgaacgggacgcgaagcgtgacaatctctggcatttgggattcgggttctcacaactcccttttacttgatcgagtaactgcggacaaacataaggtccaactgagtctctcttgggacattacttcggataatcttgcagagccaatgaagttctccacgaatttctattgccagattctggggcgaagttacgttcgtcaagcttcgatgctctcggcgctttggcagcatgtccgcatcgtccattcttcatcgtcaatcttctcattaggcttaaagccggcgcctgtcaagcatgctggtgatctgtggaggatgaatagccaacatgactacgtgaaaggcgaagaaaacctcactggctggacaccgaggggcgtttcgctaattgcagactacataacagcaaggaaaaagaaacgtcgcattggagagattggtgctgcacagctattcttgaagaagatcggtcttccggagcccaaaaccaagccgttggaggcagatgaacactctgaggatgagctatcacctataaaggcgcatgatgacgatgatgattcaatcaatgctctcttgaacgatactccacagacttcgcgtccaacaactccggagcaaggtgcagacgaaagtgctctgctggaaaatgcggaatcagagccaaagtcacaagacgccgaagccacggaaaccccaggtcctgccggggagaagctcgacaacaatcctgaggaggcgccggcagaagtacctcaagaggagccccaccaaaagcccgaagagcctgaatacgacgaagaagaaaccgcgacgctgacaaagtgccttgagctctggcgaaagttccccgatccttcgtttagcatactaagcccagcaaatacctcgccacccacaaacggtatagctcctgagtcaagcacgccaccgaaattgattgctacggttattcgcgtaccaaaaaacccctcagtcctcaagggaggttatctcttggtaccgaacaacgattcgaccaaatgggttaagagattcgttgagcttcgccgaccgtatctgcatattcacaacgccacggatggtgacgaggtcgctattgtcagcctccgtaattcaagagtcgacagccaacccgaaattttggcactgttcagtggtcatgacgatggacatggcgcggaaatgccaaccaatggcactagtagcgaagcgttccagccaggtcatcgacgcacgtcttccggacgagtagtctcttcgatttgggccgggtcccattcctcagccggtcctgggcttggcggcttgagcgagcgcttgcaagcgggtgtgttcgctgtctatggaacagacaacacttggctgtttgctgcccgcagcgagcgggataagctggattggattctccggattgaccagagttattattcaggaaacggcagtgctgctggtagcggtgccgtcagtccgcagcctcgacatcttgcatttggcgatgattgatcgcgccgcttgtctatctatacctttttcgttattggctcctcactctggatgcaatgagatcacgacagtatcaccacacatgatgcagcatatatcggccgggcttagttgcatactgaatggcatataacttttttccctttgtttattcatcgttcgaactattgtacatactatattccctgtcttccctttcgtcatttagattatacccccgtcacttcaatgccatgtcagagaaatggctgtgtttgatgtgtcaaattgtgttgtgcgcaggcttagaggtggataagagatgagtctcagatggaagggaagtgttgcgtcgaagggcttgatgttgtctaatacagagtttggtaggacaacgagactgaatggcgcacttgtgtctttcgggttgaggttgttgccgttagtatgtggtgactattaataagagagacaaattcaatgctctgttggtgacgatatttgaa

SEQ ID NO: 39980 - DNA, 1020 bp, Muscodor strobelii
  misc_feature: SGI cDNA ID NO. 573926
  misc_feature: Encodes the peptide sequence at SEQ ID NO 39981
atggtcaagcgcattctcctcacgggaggcagcggcttcatcgccgcccacgtcttagaaacattactacagcgcggccattccgtcgtgacaacagtccgcacatcgcaaaaagggaagcacattctagacgcgtatccccagcattcacgagcaacactcgactacgttatcgtggaggatatcgcaagtgctggagcattcgacaaagcagtaatttcagaccctccattccaggctgtcgtccatactgcaagcccgtatcacttcaagtcccaagataacaagaaagagctcctggagccagctataaacggcacagtaggtttactacaagcaatctacaaaaacgcaccaagcgtcagtcgcgtcgtgatcacatcctcctcagcggctattctagatcagagccagccgaccaaagtctacacagaagcagactggtgtccagtgacggaagatcaggctctcgttggcccggcgaacgggtaccgcgccagcaagacctttgcggaacgagcagcctggaaattcgtagaagacaacaagccaaatttctccctatccgtgtgcaatccacccttagtcctaggtcccgtccagcaccatctagaaacactctcatctctcaacacatccaacgagcgaatccgggatctcatgtcaggcgcagcaaaatcacgctgtccaccaacaggcaaccacctattcgtcgacgtccgggatctcgccctcggacacgcgctggccgtggagaaggacgaagcgggtggtaaacgattcttcatggttgggggaaagttctccaacaaggaaatcgcagagatcatccgtgacgaattcccagagttaaaagagaatttgcctcagggcgatgctctgaagtctggtgattaccctgctcaggggtcgtatggattcgataatacacgcagcaaacaagtgcttggacttagctatcgaccattaaaagagagtatcgtcgatgcggtgaagagcctgcagaggttcaatgtataa

SEQ ID NO: 39981 - protein, 339 aa, Muscodor strobelii
  misc_feature: SGI Peptide ID NO. 573926
  misc_feature (5)..(265): Pfam Id: PF01370 Pfam Desc: NAD dependent epimerase/dehydratase family
  misc_feature (7)..(245): Pfam Id: PF07993 Pfam Desc: Male sterility protein
  misc_feature (5)..(180): Pfam Id: PF01370 Pfam Desc: NAD dependent epimerase/dehydratase family
  misc_feature (7)..(44): Pfam Id: PF07993 Pfam Desc: Male sterility protein
  misc_feature (4)..(334): NCBI GI: 240105001 Blast Desc: NADPH-dependent methylglyoxal reductase GRE2, [Coccidioides posadasii C735 delta SOWgp]
  misc_feature (2)..(334): NCBI GI: 261197387 Blast Desc: ketoreductase [Ajellomyces dermatitidis SLH14081] gi|239595726|gb|EEQ78307.1| ketoreductase [Ajellomyces dermatitidis SLH14081]
  misc_feature (4)..(334): NCBI GI: 119195173 Blast Desc: CIMG_01961 [Coccidioides immitis RS]
  misc_feature (2)..(334): NCBI GI: 239606717 Blast Desc: ketoreductase [Ajellomyces dermatitidis ER-3]
  misc_feature (2)..(334): NCBI GI: 240281621 Blast Desc: ketoreductase [Ajellomyces capsulatus H143]
  misc_feature (2)..(334): NCBI GI: 154275680 Blast Desc: conserved [Ajellomyces capsulatus NAm1] gi|150415131|gb|EDN10493.1| conserved [Ajellomyces capsulatus NAm1]
  misc_feature (2)..(337): NCBI GI: 212531119 Blast Desc: NAD dependent epimerase/dehydratase, [Penicillium marneffei ATCC 18224] gi|210071080|gb|EEA25169.1| NAD dependent epimerase/dehydratase, [Penicillium marneffei ATCC 18224]
  misc_feature (2)..(334): NCBI GI: 225556763 Blast Desc: ketoreductase [Ajellomyces capsulatus G186AR]
  misc_feature (4)..(338): NCBI GI: 225682426 Blast Desc: conserved [Paracoccidioides brasiliensis Pb03]
  misc_feature (2)..(337): NCBI GI: 242827152 Blast Desc: dihydroflavonal-4-reductase, [Talaromyces stipitatus ATCC 10500] gi|218712029|gb|EED11457.1| dihydroflavonal-4-reductase, [Talaromyces stipitatus ATCC 10500]
  misc_feature (5)..(337): SWISSPROT Homolog: EC 1.1.1.283 Methylglyoxal reductase (NADPH-dependent)
MVKRILLTGGSGFIAAHVLETLLQRGHSVVTTVRTSQKGKHILDAYPQHSRATLDYVIVEDIASAGAFDKAVISDPPFQAVVHTASPYHFKSQDNKKELLEPAINGTVGLLQAIYKNAPSVSRVVITSSSAAILDQSQPTKVYTEADWCPVTEDQALVGPANGYRASKTFAERAAWKFVEDNKPNFSLSVCNPPLVLGPVQHHLETLSSLNTSNERIRDLMSGAAKSRCPPTGNHLFVDVRDLALGHALAVEKDEAGGKRFFMVGGKFSNKEIAEIIRDEFPELKENLPQGDALKSGDYPAQGSYGFDNTRSKQVLGLSYRPLKESIVDAVKSLQRFNV

SEQ ID NO: 39982 - DNA, 1470 bp, Muscodor strobelii
  misc_feature: SGI EST ID NO. CUFF.96634.0
  misc_feature: Variant of the nucleotide sequence at SEQ ID NO 39980
caaaacattatactagcgtcatagtaaagtcctaaatctacggtgaaaacatcggcgtcaggacataagacttaatcgccgatgacgttgtgaataataacgtggaaatatttcatagcaatatagaccgaaccgaagatcgcgactcgggcttccttaacacctgtcgcgaacatcaatatatttacagccagtccatcggtctatttgtatatcgaatttcttgaacttcggttacttcgaacaacttgaagagcgcgaagtacagtccatagaataacaaaatggtcaagcgcattctcctcacgggaggcagcggcttcatcgccgcccacgtcttagaaacattactacagcgcggccattccgtcgtgacaacagtccgcacatcgcaaaaagggaagcacattctagacgcgtatccccagcattcacgagcaacactcgactacgttatcgtggaggatatcgcaagtgctggagcattcgacaaagcagtaatttcagaccctccattccaggctgtcgtccatactgcaagcccgtatcacttcaagtcccaagataacaagaaagagctcctggagccagctataaacggcacagtaggtttactacaagcaatctacaaaaacgcaccaagcgtcagtcgcgtcgtgatcacatcctcctcagcggctattctagatcagagccagccgaccaaagtctacacagaagcagactggtgtccagtgacggaagatcaggctctcgttggcccggcgaacgggtaccgcgccagcaagacctttgcggaacgagcagcctggaaattcgtagaagacaacaagccaaatttctccctatccgtgtgcaatccacccttagtcctaggtcccgtccagcaccatctagaaacactctcatctctcaacacatccaacgagcgaatccgggatctcatgtcaggcgcagcaaaatcacgctgtccaccaacaggcaaccacctattcgtcgacgtccgggatctcgccctcggacacgcgctggccgtggagaaggacgaagcgggtggtaaacgattcttcatggttgggggaaagttctccaacaaggaaatcgcagagatcatccgtgacgaattcccagagttaaaagagaatttgcctcagggcgatgctctgaagtctggtgattaccctgctcaggggtcgtatggtgagtttttctcctacgtttcgagttcgtttgtgttcgacagaacaagtgatttgctgtaaatggcggcaattgactgatgtttatacaggattcgataatacacgcagcaaacaagtgcttggacttagctatcgaccattaaaagagagtatcgtcgatgcggtgaagagcctgcagaggttcaatgtataaagctgtccactatacatacctaacgtagcttagagatgaatgatcacttccgccagatgcccttttagagtccca

SEQ ID NO: 39983 - DNA, 687 bp, Muscodor strobelii
  misc_feature: SGI cDNA ID NO. 573927
  misc_feature: Encodes the peptide sequence at SEQ ID NO 39984
atgcgtgtcgcttctcttctcttactcgccgccgccgacgcgcaggcagggctcatcaagtcacgagctgtcattgcccatgacgcagtcgttggtttcgcccagtccgcttcgacgctccagttgaaatggaaaccttggctaaaagtcgtcaatggctgtgtgccgtttcctgccgttgattcggctggtaatacgggaggtggtctatctccaactggaggttctaacgctggttgttcaagcagcgcaggccaagtgtacactcgaggcgcgcaatatgaagattattatgggttgatgtactcttggtatatgccgaaagatgagccatcggatggactcggacatcgtcacgattgggaaggtatcgtcgtctggcttagcagctctgctagtgatgcaaccatcgttggtctatcaacgtctgcccacggcggcttcagcactattactagcaatttcccattagacggaactcgtccaaagattcagtactacagcacctggccgttggatcaccagctaggcacaacagatactgtcggtggcgagcaacctcttatatcttgggagaatttgacggctgctgcaagaatcgcgcttcaaaatacagattttggcgatgccaatgtcccgttcaaagatggaaacttcgagtcgaatttggccgaggcgtatccttag

SEQ ID NO: 39984 - protein, 228 aa, Muscodor strobelii
  misc_feature: SGI Peptide ID NO. 573927
  misc_feature (3)..(228): Pfam Id: PF05630 Pfam Desc: Necrosis inducing protein (NPP1)
  misc_feature (3)..(226): NCBI GI: 70985546 Blast Desc: NPP1 domain protein [Aspergillus fumigatus Af293] gi|66845907|gb|EAL86241.1| NPP1 domain protein, [Aspergillus fumigatus Af293]
  misc_feature (3)..(226): NCBI GI: 119499501 Blast Desc: NPP1 domain protein [Neosartorya fischeri NRRL 181] gi|119414672|gb|EAW24611.1| NPP1 domain protein [Neosartorya fischeri NRRL 181]
  misc_feature (3)..(226): NCBI GI: 159125790 Blast Desc: NPP1 domain protein, [Aspergillus fumigatus A1163]
  misc_feature (1)..(226): NCBI GI: 78431246 Blast Desc: necrosis- and ethylene-inducing protein 2 precursor [Botrytis tulipae]
  misc_feature (19)..(226): NCBI GI: 78431504 Blast Desc: necrosis- and ethylene-inducing protein 2 precursor [Botrytis elliptica]
  misc_feature (19)..(226): NCBI GI: 115252979 Blast Desc: necrosis and ethylene inducing peptide 2 precursor [Botrytis elliptica] gi|144225264|emb|CAJ98684.1| necrosis and ethylene inducing peptide 2 [Botrytis elliptica]
  misc_feature (1)..(219): NCBI GI: 88683332 Blast Desc: necrosis and ethylene inducing peptide 2 precursor [Botrytis tulipae] gi|88683334|emb|CAJ31864.1| necrosis and ethylene inducing peptide 2 precursor [Botrytis tulipae] necrosis
  misc_feature (1)..(227): NCBI GI: 189209179 Blast Desc: PTRG_10591 [Pyrenophora tritici-repentis Pt-1C-BFP] gi|187977015|gb|EDU43641.1| PTRG_10591 [Pyrenophora tritici-repentis Pt-1C-BFP]
  misc_feature (22)..(226): NCBI GI: 115401908 Blast Desc: ATEG_07921 [Aspergillus terreus NIH2624] gi|114190483|gb|EAU32183.1| ATEG_07921 [Aspergillus terreus NIH2624]
  misc_feature (1)..(226): NCBI GI: 238504652 Blast Desc: NPP1 domain protein, [Aspergillus flavus NRRL3357] gi|220691028|gb|EED47377.1| NPP1 domain protein, [Aspergillus flavus NRRL3357]
MRVASLLLLAAADAQAGLIKSRAVIAHDAVVGFAQSASTLQLKWKPWLKVVNGCVPFPAVDSAGNTGGGLSPTGGSNAGCSSSAGQVYTRGAQYEDYYGLMYSWYMPKDEPSDGLGHRHDWEGIVVWLSSSASDATIVGLSTSAHGGFSTITSNFPLDGTRPKIQYYSTWPLDHQLGTTDTVGGEQPLISWENLTAAARIALQNTDFGDANVPFKDGNFESNLAEAYP

SEQ ID NO: 39985 - DNA, 1812 bp, Muscodor strobelii
  misc_feature: SGI EST ID NO. CUFF.96591.0
  misc_feature: Variant of the nucleotide sequence at SEQ ID NO 39983
gcgaaacattcgaagtcacgtccaataagttcatcgacagaacgatccttgaaaagcatattgcgcacttgcgattgaatcatgcgattcgaaactgctacggacgcctacaggcaatcatcagcgaggaggcgggcttggcttcatactcacagaacagattcacacatcacaatacggcgctagttgcaatgaaatatcgaaaatccatgtagcggtctctggaatgagatgactggcaaatagatggccgagagtaagtgcgaatagacgtcggctttgttattagcatcgagcaatacatcaggactataacggtagacatgattaatcaacagtctcgagttctaactacgccgtcacctccttcacgcattcgcacgccatgagaaattagacaatattcattctcgttcgtattgtgatgcacagcatccggcgggtcccgatgacgacgctccaaccccgtggcggacgggactccaacccctatctgggaccgtctccgaccgggaaattctccgaacttcatgcattcctcgatccgccaatcgtgccggtcaattaagatgaaggttgctttcctgctgaattccaaggccaccggtcttctgcgtctctaagacatgaacccatagcattgggcgaaccctggcgagcaagggttcacgctagacgtggcgaggtcgacttacgtcaactattccatgaacgtgccctgtgtcagatccatgaatggatatctccacgcttgggcgatgcaagataaattaactgcgatgaaccttgcatcggcctaagtgtcccggctgagaaagtgacactacctctcaacgcgaaaggttaaccgagccctatcgcgactcctcgtcggcgattttggtataaatacgctgcatcctgtgcttctacattcgtattgcgtcgagagccgccacgaccttcgactcacgcggttgcttcgactcaacatgcgtgtcgcttctcttctcttactcgccgccgccgacgcgcaggcagggctcatcaagtcacgagctgtcattgcccatgacgcagtcgttggtttcgcccagtccgcttcgacgctccagttgaaatggaaaccttggctaaaagtcgtcaatggctgtgtgccgtttcctgccgttgattcggctggtaatacgggaggtggtctatctccaactggaggttctaacgctggttgttcaagcagcgcaggccaagtgtacactcgaggcgcgcaatatgaagattattatgggttgatgtactcttggtatatgccgaaagatgagccatcggatggactcggacatcgtcacgattgggaaggtatcgtcgtctggcttagcagctctgctagtgatgcaaccatcgttggtctatcaacgtctgcccacggcggcttcagcactattactagcaatttcccattagacggaactcgtccaaagattcagtactacagcacctggccgttggatcaccagctaggcacaacagatactgtcggtggcgagcaacctcttatatcttgggagaatttgacggctgctgcaagaatcgcgcttcaaaatacagattttggcgatgccaatgtcccgttcaaagatggaaacttcgagtcgaatttggccgaggcgtatccttagtttaatgctagacaataggtcgtatttagcctcatgatattaattagatggtgatacttagcagagcgctgagtctttcaaatatggaattgtgtgaagggcacaagacttgacgcaaatctaaattatgacaatttaggtccgcatgtatttc

SEQ ID NO: 39986 - DNA, 1608 bp, Muscodor strobelii
  misc_feature: SGI cDNA ID NO. 573928
  misc_feature: Encodes the peptide sequence at SEQ ID NO 39987
atgtttccagctgtgtgggactatatcgtcgttggtggtggacttgcgggcaccgttatatcgaatcgtcttttgcactacaacagttcactacagattctgcttattgaagcgggacgtgatgctagccacgatcctagcattctctatcataattcaacaaacttggtccacgggacttacgattgggcatatctaacgacagcccagacgcatctcaacaatcgacatatcgatgctcctgctggccactgtctgggcggtggaactgcgattaatggtgcggcatggtatcgtggcgctcgaacggattataacgactgggccgatgtggtgaatgacacgcgatggaattacgataatatgctgcagtacttcaagatgaccgagcattggttcagttcagagaatgcggatcagcacggccaaaatggaaagatatacgtatcatcagcttcaaacgagaatcgcacatacccgcttcaaaatgctgaactcgactcatggcgacaactcggtgtgccggtccactctgaccttgatatgaatatcggaaataatattggtgttggtgagctgaacacagaccgcatcaggggtgtacgagaagttgccaattcgaggtactccctcgcgggtattacagtactgaccagcacatgggtgcaatccgtcgttatcggcacgcatggcggtgtgccaactgctactggagttgagttgaagaatggaactagatactctgcgaaggaagagttggccctcgggcaacccttgaaaaacataatgattaccgtaaagtacaatgctcctcaggttggtcagaacttcctggatcatttccagatgaccttcaattggaagctccgggatccctccaagggatatgctatcggctccaataatacgctgttccacgagccgcagtactcttggaatactaatgccaaccacgtcgcgtcgactactgtgccacgggatgggttagccgctgcattcgaaatcgatgaaggcgctcctcctgattactcgacaaatctcctcctgcgcaacgcacaggccatgaacgaaaatgtcgtgtcgtgggtagccaaaaaagaggatggtgtaaagatcaatggcactcatattggcacaacgatcgtaggattgaaacctacatctcgcggtagcattactatttcatctgctagaatcgaaagtggcccgatcatcaatcctaattactacgctactgaagtcgacagatactcctggcgtacaggaatacgcaatattacatcgctgatggccggaaataccacattcggccggaactatattgtcggtgaaactccaccaccgggatttcctgccctcagcggctccgttacagacgaagagattgatgctcgagtagcagccaaagcattctcgacatatcacccaatgggctcatgtgcgatgggaaaggtcgtcgatactaatcttcgagtttatggtgttaacaatttgcgtgttgcagacgcatctatcattcccattgccataggtgcccacacgcagggtccgacttatgcccttgcagagcatgctgctgccatcatcgccggagtcgccaatagctga

SEQ ID NO: 39987 - protein, 535 aa, Muscodor strobelii
  misc_feature: SGI Peptide ID NO. 573928
  misc_feature (379)..(525): Pfam Id: PF05199 Pfam Desc: GMC oxidoreductase
  misc_feature (6)..(295): Pfam Id: PF00732 Pfam Desc: GMC oxidoreductase
  misc_feature (459)..(525): Pfam Id: PF05199 Pfam Desc: GMC oxidoreductase
  misc_feature (6)..(156): Pfam Id: PF00732 Pfam Desc: GMC oxidoreductase
  misc_feature (7)..(41): Pfam Id: PF05834 Pfam Desc: Lycopene cyclase protein
  misc_feature (5)..(529): NCBI GI: 256724344 Blast Desc: NECHADRAFT_87530 [Nectria haematococca mpVI 77-13-4]
  misc_feature (7)..(533): NCBI GI: 46115062 Blast Desc: FG03373.1 [Gibberella zeae PH-1]
  misc_feature (7)..(531): NCBI GI: 238501768 Blast Desc: glucose dehydrogenase, [Aspergillus flavus NRRL3357] gi|220692355|gb|EED48702.1| glucose dehydrogenase, [Aspergillus flavus NRRL3357]
  misc_feature (7)..(531): NCBI GI: 169769302 Blast Desc: [Aspergillus oryzae RIB40] gi|83766979|dbj|BAE57119.1| protein product [Aspergillus oryzae]
  misc_feature (6)..(529): NCBI GI: 67526147 Blast Desc: AN3531.2 [Aspergillus nidulans FGSC A4] gi|40739666|gb|EAA58856.1| AN3531.2 [Aspergillus nidulans FGSC A4] gi|259481951|tpe|CBF75954.1| TPA: GMC oxidoreductase nidulans
  misc_feature (6)..(529): NCBI GI: 67900560 Blast Desc: AN7267.2 [Aspergillus nidulans FGSC A4] gi|40741948|gb|EAA61138.1| AN7267.2 [Aspergillus nidulans FGSC A4] gi|259483387|tpe|CBF78736.1| TPA: conserved [Aspergillus FGSC
  misc_feature (2)..(529): NCBI GI: 145244078 Blast Desc: An11g05600 [Aspergillus niger] gi|134079234|emb|CAK40717.1| protein product [Aspergillus niger]
  misc_feature (6)..(515): NCBI GI: 145259027 Blast Desc: An04g08890 [Aspergillus niger] gi|134074864|emb|CAK38976.1| protein product [Aspergillus niger]
  misc_feature (6)..(529): NCBI GI: 242779381 Blast Desc: glucose dehydrogenase, [Talaromyces stipitatus ATCC 10500] gi|218723050|gb|EED22468.1| glucose dehydrogenase, [Talaromyces stipitatus ATCC 10500]
  misc_feature (5)..(529): NCBI GI: 212535270 Blast Desc: glucose-methanol-choline (gmc) oxidoreductase, [Penicillium marneffei ATCC 18224] gi|210070190|gb|EEA24280.1| glucose-methanol-choline (gmc) oxidoreductase, [Penicillium ATCC
  misc_feature (6)..(518): SWISSPROT Homolog: EC 1.1.99.1 Choline dehydrogenase
MFPAVWDYIVVGGGLAGTVISNRLLHYNSSLQILLIEAGRDASHDPSILYHNSTNLVHGTYDWAYLTTAQTHLNNRHIDAPAGHCLGGGTAINGAAWYRGARTDYNDWADVVNDTRWNYDNMLQYFKMTEHWFSSENADQHGQNGKIYVSSASNENRTYPLQNAELDSWRQLGVPVHSDLDMNIGNNIGVGELNTDRIRGVREVANSRYSLAGITVLTSTWVQSVVIGTHGGVPTATGVELKNGTRYSAKEELALGQPLKNIMITVKYNAPQVGQNFLDHFQMTFNWKLRDPSKGYAIGSNNTLFHEPQYSWNTNANHVASTTVPRDGLAAAFEIDEGAPPDYSTNLLLRNAQAMNENVVSWVAKKEDGVKINGTHIGTTIVGLKPTSRGSITISSARIESGPIINPNYYATEVDRYSWRTGIRNITSLMAGNTTFGRNYIVGETPPPGFPALSGSVTDEEIDARVAAKAFSTYHPMGSCAMGKVVDTNLRVYGVNNLRVADASIIPIAIGAHTQGPTYALAEHAAAIIAGVANS

SEQ ID NO: 39988 - DNA, 1185 bp, Muscodor strobelii
  misc_feature: SGI cDNA ID NO. 573929
  misc_feature: Encodes the peptide sequence at SEQ ID NO 39989
atggctcttgcatcttcgactacaggcactcttgggaatctcacggcccaagaagaccaaaagcttcagcaagcatggatacacttactccgcctttgtggcgtggacagcatcgaaaaacaaagtggaacgaacgttgtaccagaccttagcgatcagctatcaagtcagctcaagaaaaagtccccagaggccttccgagataatctctggggcttcatactagcagaacatcctgacgcactcattctacgtttcctacgtgctagaaaatgggacgtcgaaaaggctatgatgatgctcgtttccgcagtcaactggcgtgatgaaagagatatgatggaaacaatcatccggacaggagaagatgttgccttgaaggacaacccttccgaagacgaaaaggcatttatcacgcagtatcgctctggaaagagctacgttcatggcacggataaagagcaccgcctcgtttatgtcatcagagtccgattacacgatccgaaactccaatcatctcaagctatggaatcctacattcttcataacatcgagagcctcagaatattgatgcaccctccgaacgacaagtgctgtctaatttttgatttgaccgggtttgggctcaaaaacatggattttcacgttgttaaatttctcacctcagtattcgaagctcgatatcctgagacacttggcctagtgctaatccataatgcacctttcgtgttctggggggtttggagcctgataaagggttggctggatcccgttatcgcatctaagattcacttcacccgcaaatcagcagatttattgcaatgggttgctccggagaacctacagaccagctttggtgggaaggatcagttcgaatacgagtacatccagccttcacccggcgagaacgccagactagaggcgcacgaggaaagggagaagattcaaagcgagcgaaaggagctgatacacgaatttgagatcaagactgcagagtgggcatctctcaaacctgactctgccgctgccactgacctagcatcggaccgaggaaaattagttacacaactcagcgaggtctactggaagcttgacccctacattagagccaagactctcgatagtcgggctgacattgtaattgacgggcagcaagcacactgtagcgagtcgcagactgtctag

SEQ ID NO: 39989 - protein, 394 aa, Muscodor strobelii
  misc_feature: SGI Peptide ID NO. 573929
  misc_feature (145)..(318): Pfam Id: PF00650 Pfam Desc: CRAL/TRIO domain
  misc_feature (48)..(114): Pfam Id: PF03765 Pfam Desc: CRAL/TRIO, N-terminus
  misc_feature (76)..(110): Pfam Id: PF03765 Pfam Desc: CRAL/TRIO, N-terminus
  misc_feature (4)..(383): NCBI GI: 116200943 Blast Desc: CHGG_08356 [Chaetomium globosum CBS 148.51] gi|88176874|gb|EAQ84342.1| CHGG_08356 [Chaetomium globosum CBS 148.51]
  misc_feature (6)..(380): NCBI GI: 256721229 Blast Desc: NECHADRAFT_34800 [Nectria haematococca mpVI 77-13-4]
  misc_feature (5)..(372): NCBI GI: 46139581 Blast Desc: FG11305.1 [Gibberella zeae PH-1]
  misc_feature (9)..(394): NCBI GI: 261360038 Blast Desc: phosphatidylinositol transfer protein CSR1 [Verticillium albo-atrum VaMs.102]
  misc_feature (9)..(383): NCBI GI: 46127145 Blast Desc: FG07950.1 [Gibberella zeae PH-1]
  misc_feature (9)..(384): NCBI GI: 256721639 Blast Desc: NECHADRAFT_59675 [Nectria haematococca mpVI 77-13-4]
  misc_feature (9)..(380): NCBI GI: 70992597 Blast Desc: CRAL/TRIO domain protein [Aspergillus fumigatus Af293] gi|66848780|gb|EAL89109.1| CRAL/TRIO domain protein [Aspergillus fumigatus Af293] gi|159124718|gb|EDP49836.1| CRAL/TRIO domain
  misc_feature (49)..(383): NCBI GI: 164424673 Blast Desc: NCU06877 [Neurospora crassa OR74A] gi|157070613|gb|EAA29988.2| [Neurospora crassa OR74A]
  misc_feature (9)..(380): NCBI GI: 119472756 Blast Desc: CRAL/TRIO domain protein [Neosartorya fischeri NRRL 181] gi|119406563|gb|EAW16514.1| CRAL/TRIO domain protein [Neosartorya fischeri NRRL 181]
  misc_feature (9)..(380): NCBI GI: 145236727 Blast Desc: An06g01900 [Aspergillus niger] gi|134075472|emb|CAK48033.1| protein product [Aspergillus niger]
MALASSTTGTLGNLTAQEDQKLQQAWIHLLRLCGVDSIEKQSGTNVVPDLSDQLSSQLKKKSPEAFRDNLWGFILAEHPDALILRFLRARKWDVEKAMMMLVSAVNWRDERDMMETIIRTGEDVALKDNPSEDEKAFITQYRSGKSYVHGTDKEHRLVYVIRVRLHDPKLQSSQAMESYILHNIESLRILMHPPNDKCCLIFDLTGFGLKNMDFHVVKFLTSVFEARYPETLGLVLIHNAPFVFWGVWSLIKGWLDPVIASKIHFTRKSADLLQWVAPENLQTSFGGKDQFEYEYIQPSPGENARLEAHEEREKIQSERKELIHEFEIKTAEWASLKPDSAAATDLASDRGKLVTQLSEVYWKLDPYIRAKTLDSRADIVIDGQQAHCSESQTV

SEQ ID NO: 39990 - DNA, 1659 bp, Muscodor strobelii
  misc_feature: SGI EST ID NO. CUFF.96598.0
  misc_feature: Variant of the nucleotide sequence at SEQ ID NO 39988
gctgtctagtctcttggtgcgattcactggttctttgaggccaatgttgcacggtcggtaatgcgtttcaaatgtgtgcatagtgccaattgtctaccgcgttctaccacttcactgtatagtctttccgccatcgcatttggagcggcaacaagatacacaaatcgagttagaaatctttccgctgtttgtcaattgctgttatatttgccatcgccaaccttacgagtggacgtggccagatcttacctctaccttgcttcaacactggcaagacattgaagaatacttcttatttagtcacaggaacacactcatggctcttgcatcttcgactacaggcactcttgggaatctcacggcccaagaagaccaaaagcttcagcaagcatggatacacttactccgcctttgtggcgtggacagcatcgaaaaacaaagtggaacgaacgttgtaccagaccttagcgatcagctatcaagtcagctcaagaaaaagtccccagaggccttccgagataatctctggggcttcatactagcagaacatcctgacgcactcattctacgtttcctacgtgctagaaaatgggacgtcgaaaaggctatgatgatgctcgtttccgcagtcaactggcgtgatgaaagagatatgatggaaacaatcatccggacaggagaagatgttgccttgaaggacaacccttccgaagacgaaaaggcatttatcacgcagtatcgctctggaaagagctacgttcatggcacggataaagagcaccgcctcgtttatgtcatcagagtccgattacacgatccgaaactccaatcatctcaagctatggaatcctacattcttcataacatcgagagcctcagaatattgatgcaccctccgaacgacaagtgctgtctaatttttgatttgaccgggtttgggctcaaaaacatggattttcacgttgttaaatttctcacctcagtattcgaagctcgatatcctgagacacttggcctagtgctaatccataatgcacctttcgtgttctggggggtttggagcctgataaagggttggctggatcccgttatcgcatctaagattcacttcacccgcaaatcagcagatttattgcaatgggttgctccggagaacctacagaccagctttggtgggaaggatcagttcgaatacgagtacatccagccttcacccggcgagaacgccagactagaggcgcacgaggaaagggagaagattcaaagcgagcgaaaggagctgatacacgaatttgagatcaagactgcagagtgggcatctctcaaacctgactctgccgctgccactgacctagcatcggaccgaggaaaattagttacacaactcagcgaggtctactggaagcttgacccctacattagagccaagactctcgatagtcgggctgacattgtaattgacgggcagcaagcacactgtagcgagtcgcagactgtctagggatacatcggcacaacatttgccccttatagattttggcttagtcttacttcaacatcatttcctgatataccaacaaaggcagtttgatttatcgccacacatttatgatcgatccaaagcagcaaataaatcgcaatggaattgatgttctcacg

SEQ ID NO: 39991 - DNA, 1458 bp, Muscodor strobelii
  misc_feature: SGI cDNA ID NO. 573930
  misc_feature: Encodes the peptide sequence at SEQ ID NO 39992
atggctacttctaataccatggactttgacgttgtcattgtcggcgctgggatttctggcatcaatgcagcttatcgtgtccaagccgaggctggtatgaagtatgccttgctcgaaagcagagcctccatcggcggcacatgggacctattccgttacccaggaatcaggtcagattcggatgcttatacacttgggtttgcgtggaacccatggaaactcccacggcagctggcatctggagaagagattcggaattacttgaatcagtcggtcaaatcggctggcatagataaacacatctactatcgtcatgcagtccaaacagcaaattggagctctaccgaaagggcctggatgctcaacgtgagtgtacccggcaaagagagcccggtagtctttaaatcgcgcttcttgcttctcggcacaggctattacgactatcaaaagcctttgcaggccgtcatcccaggcattgaagacttcaaaggcaaagttatccatccacaattctggcctgaagactacgactatacagacaaagagatagtcattattggcagtggtgcaacagctgtcacaattctaccaaatattgccaatagggcgaaacgcacaaccatgctgcaaaggagcccagggtacattttctctctaccctcaaagaatgcatttgcaagactgctctttgcgatcttccccgctgctctagcacattggttgaataggctgatatggatctttcgtggctatttgacggttgcgttttgcaagggctatcccgaggtagccaaacgatttgttaaatataaaacagtacagcagctgcccccagacatgaagtgggatcccaacttcaaacctcgttatgacccatgggagcagcgtttctgcgcgtgcgtggacggggatttctttgcagctttacgctcggggaaagccgacgtggtcactgataagatcaaaactgtgaccagtacgggtatagagctctcatcaggggcagctcttcatccggatgtaatcgttacggcgaccgggctgaagctcaaatttggtggaggtgtacgattttcgatcgatggccaacactttgagatcagtgacaaattcgcatggaggacagcaatgattcaagacgtgccaaacatgtttttcctgaccgggtatgagaatgcgacgtggacgcttggcgccgatattgcagtcacgctttttcttcgcttgcttcccttcatggcgcaaagaaaggctaaggctgtcgttccaaagctcagcgactccgattttactatggaggaaaagccaatgatgagtttacagtcaacgtatgtgaagacagcgggcaaagttttccccaagggtggcacaggttcatggagcccaaaggagaattatctctcagacatggcggctgctaagttcggtaacattacgaaagacctgctgttcgtataa

SEQ ID NO: 39992 - protein, 485 aa, Muscodor strobelii
  misc_feature: SGI Peptide ID NO. 573930
  misc_feature (10)..(46): Pfam Id: PF01266 Pfam Desc: FAD dependent oxidoreductase
  misc_feature (7)..(46): Pfam Id: PF01946 Pfam Desc: Thi4 family
  misc_feature (3)..(485): NCBI GI: 46139567 Blast Desc: FG11298.1 [Gibberella zeae PH-1]
  misc_feature (5)..(484): NCBI GI: 116200945 Blast Desc: CHGG_08357 [Chaetomium globosum CBS 148.51] gi|88176875|gb|EAQ84343.1| CHGG_08357 [Chaetomium globosum CBS 148.51]
  misc_feature (7)..(485): NCBI GI: 119484002 Blast Desc: flavin-binding monooxygenase, [Neosartorya fischeri NRRL 181] gi|119410060|gb|EAW20007.1| flavin-binding monooxygenase, [Neosartorya fischeri NRRL 181]
  misc_feature (7)..(485): NCBI GI: 121714827 Blast Desc: flavin-binding monooxygenase, [Aspergillus clavatus NRRL 1] gi|119403179|gb|EAW13597.1| flavin-binding monooxygenase, [Aspergillus clavatus NRRL 1]
  misc_feature (7)..(485): NCBI GI: 70982843 Blast Desc: flavin-binding monooxygenase [Aspergillus fumigatus Af293] gi|66844574|gb|EAL84911.1| flavin-binding monooxygenase, [Aspergillus fumigatus Af293]
  misc_feature (7)..(485): NCBI GI: 159123833 Blast Desc: flavin-binding monooxygenase, [Aspergillus fumigatus A1163]
  misc_feature (5)..(485): NCBI GI: 255939438 Blast Desc: Pc16g00690 [Penicillium chrysogenum Wisconsin 54-1255] gi|211585111|emb|CAP92739.1| Pc16g00690 [Penicillium chrysogenum Wisconsin 54-1255]
  misc_feature (8)..(485): NCBI GI: 115449805 Blast Desc: conserved [Aspergillus terreus NIH2624] gi|114187649|gb|EAU29349.1| conserved [Aspergillus terreus NIH2624]
  misc_feature (8)..(485): NCBI GI: 67903822 Blast Desc: AN8898.2 [Aspergillus nidulans FGSC A4] gi|40744956|gb|EAA64112.1| AN8898.2 [Aspergillus nidulans FGSC A4] gi|259486668|tpe|CBF84706.1| TPA: flavin-binding [Aspergillus
  misc_feature (2)..(482): NCBI GI: 261187944 Blast Desc: flavin-binding monooxygenase [Ajellomyces dermatitidis SLH14081] gi|239593400|gb|EEQ75981.1| flavin-binding monooxygenase [Ajellomyces dermatitidis SLH14081]
  misc_feature (4)..(389): SWISSPROT Homolog: EC 1.14.13.22 Cyclohexanone monooxygenase
MATSNTMDFDVVIVGAGISGINAAYRVQAEAGMKYALLESRASIGGTWDLFRYPGIRSDSDAYTLGFAWNPWKLPRQLASGEEIRNYLNQSVKSAGIDKHIYYRHAVQTANWSSTERAWMLNVSVPGKESPVVFKSRFLLLGTGYYDYQKPLQAVIPGIEDFKGKVIHPQFWPEDYDYTDKEIVIIGSGATAVTILPNIANRAKRTTMLQRSPGYIFSLPSKNAFARLLFAIFPAALAHWLNRLIWIFRGYLTVAFCKGYPEVAKRFVKYKTVQQLPPDMKWDPNFKPRYDPWEQRFCACVDGDFFAALRSGKADVVTDKIKTVTSTGIELSSGAALHPDVIVTATGLKLKFGGGVRFSIDGQHFEISDKFAWRTAMIQDVPNMFFLTGYENATWTLGADIAVTLFLRLLPFMAQRKAKAVVPKLSDSDFTMEEKPMMSLQSTYVKTAGKVFPKGGTGSWSPKENYLSDMAAAKFGNITKDLLFV

SEQ ID NO: 39993 - DNA, 1648 bp, Muscodor strobelii
  misc_feature: SGI EST ID NO. CUFF.96601.0
  misc_feature: Variant of the nucleotide sequence at SEQ ID NO 39991
tctcagttatcaacaaggtatcattcggctttgtttctcacagttcatctacgtataagtcatgaccaactgaacgccgaacctatcgtatctcagcttacatagaacaaacacgctatcaatggctacttctaataccatggactttgacgttgtcattgtcggcgctgggatttctggcatcaatgcagcttatcgtgtccaagccgaggctggtatgaagtatgccttgctcgaaagcagagcctccatcggcggcacatgggacctattccgttacccaggaatcaggtcagattcggatgcttatacacttgggtttgcgtggaacccatggaaactcccacggcagctggcatctggagaagagattcggaattacttgaatcagtcggtcaaatcggctggcatagataaacacatctactatcgtcatgcagtccaaacagcaaattggagctctaccgaaagggcctggatgctcaacgtgagtgtacccggcaaagagagcccggtagtctttaaatcgcgcttcttgcttctcggcacaggctattacgactatcaaaagcctttgcaggccgtcatcccaggcattgaagacttcaaaggcaaagttatccatccacaattctggcctgaagactacgactatacagacaaagagatagtcattattggcagtggtgcaacagctgtcacaattctaccaaatattgccaatagggcgaaacgcacaaccatgctgcaaaggagcccagggtacattttctctctaccctcaaagaatgcatttgcaagactgctctttgcgatcttccccgctgctctagcacattggttgaataggctgatatggatctttcgtggctatttgacggttgcgttttgcaagggctatcccgaggtagccaaacgatttgttaaatataaaacagtacagcagctgcccccagacatgaagtgggatcccaacttcaaacctcgttatgacccatgggagcagcgtttctgcgcgtgcgtggacggggatttctttgcagctttacgctcggggaaagccgacgtggtcactgataagatcaaaactgtgaccagtacgggtatagagctctcatcaggggcagctcttcatccggatgtaatcgttacggcgaccgggctgaagctcaaatttggtggaggtgtacgattttcgatcgatggccaacactttgagatcagtgacaaattcgcatggaggacagcaatgattcaagacgtgccaaacatgtttttcctgaccgggtatgagaatgcgacgtggacgcttggcgccgatattgcagtcacgctttttcttcgcttgcttcccttcatggcgcaaagaaaggctaaggctgtcgttccaaagctcagcgactccgattttactatggaggaaaagccaatgatgagtttacagtcaacgtatgtgaagacagcgggcaaagttttccccaagggtggcacaggttcatggagcccaaaggagaattatctctcagacatggcggctgctaagttcggtaacattacgaaagacctgctgttcgtataatgtcttcaacgaaattattcggaacttatgtttgcccgtttaaagccctcatgtttagatagacgaaga

SEQ ID NO: 39994 - DNA, 273 bp, Muscodor strobelii
  misc_feature: SGI cDNA ID NO. 573931
  misc_feature: Elevated expression when VOC is produced
  misc_feature: Encodes the peptide sequence at SEQ ID NO 39995
gagcttcgggccaggtgcgacggtctgcggccgccggctcatctgcgcaacgccacgagcggtgttgagcatgggagattcgaaacaccgccgccgctgctgccgcctctcctaccgcagccgctcgcgacgcccgacaactcgtcgtgggatggcctcacgctactcgcagaatcagcggcgagcgacgaattacagctggctaacgagaagaagcggccagcgtggagtaacgccggcaataaaaacaagcggccgaggcttgccgaatga

SEQ ID NO: 39995 - protein, 90 aa, Muscodor strobelii
  misc_feature: SGI Peptide ID NO. 573931
  misc_feature: Useful for introducing or modulating the production of volatile compounds
ELRARCDGLRPPAHLRNATSGVEHGRFETPPPLLPPLLPQPLATPDNSSWDGLTLLAESAASDELQLANEKKRPAWSNAGNKNKRPRLAE

SEQ ID NO: 39996 - DNA, 1045 bp, Muscodor strobelii
  misc_feature: SGI EST ID NO. CUFF.96603.0
  misc_feature: Variant of the nucleotide sequence at SEQ ID NO 39994
aggagcttcgggccaggtgcgacggtctgcggccgccggctcatctgcgcaacgccacgagcggtgttgagcatgggagattcgaaacaccgccgccgctgctgccgcctctcctaccgcagccgctcgcgacgcccgacaactcgtcgtgggatggcctcacgctactcgcagaatcagcggcgagcgacgaattacagctggctaacgagaagaagcggccagcgtggagtaacgccggcaataaaaacaagcggccgaggcttgccgaatgagggattttgatagtgtatctactctaagacgaatggcaacagctacagaatacagtgagatggcggattgactggcatggtgtttattgttaccgtatactatagtcctttcgatccgagtatatacagtatcgcgccatattgtaatacagcgaggttcgttatttactcaatcatttttttagagttttgtgttaaagcattaggggctctgcttatttgggatgactgtttggccgtgtttcgggttgaggctatcccttcgggtctgattagctttaaaaaataaaatactaataaaaaaaaagttatcgtgcttgtgaaaatacgtcctattctaatatgtaagattaccaaatataaccttgcaatattgcaagatgtgcataggtcgtggaagacaagtctattgccctcattgccgttctccgacacgaacgatcaactcatcaaatatacaccaccgtctgtctataattatataccgaagaggtccaaaattggacctgaacggatctaaatctggacatggaaaactcacaagcagatcgcgtatacatatagagagcgttacgttagtacggctggaaggaaacctttctggctgtatggacgtctatattcaggctctgcacttagttcgacgtatctactctccacggccacatggctaagcaaagcagtgcccacctcaaaggtcaaaaggacaaagccaggaagcgcggcacctctctccagaggaaggcggtggagctaggccagaaagcgaa

SEQ ID NO: 39997 - DNA, 1194 bp, Muscodor strobelii
  misc_feature: SGI cDNA ID NO. 573932
  misc_feature: Encodes the peptide sequence at SEQ ID NO 39998
atgatcagagaccaagagctaaaaggttgcatcaggtggcggtacttggagagtggtcttcgcaagggcggtttttgggttccatcggagatgctcacttcacgacatctccaggtaaaccgcattaagttacatattgaaaatttaccccttagagacttcagagcggagcagtataacccatacttgagagctatcccagcagccgctctcacgtcactccatgtggccattccaacaccaccactcaccgctcgactagaaacgttgaaggggctgctgcttgaatcccatcaactccagacattctcactgggcgacagaggccaagggacgcagttttcattcaccaatcacgagcgactaccagcttttaccaacctatcgcttcgctcatacgattgggaccatagctggggtgaagttgctaggcactggaatttcacgaagatcaaacatctcgaattgattgatgtaccactatatccttttttctgctcaatatcgttcgaagattttcaaaatctcaaaagtctacaactagatgatttcagcacgcatctgcaaaacaggcgccgggagacgacagagggtcaatattatttcatcaagagaattagagagctggtagacttaaggattacttgccaaactttgcattttccagttgacggcataatccagcacgcaagctcgctacaggtcttgcgcctccgcgactacaccggattcagcgatgaataccgccgttgtcccacgataagactccaagatttgcagcacttggcgtgtaccctctcgcagctccatacactcgagatcgatatggacgagaggttatgtgatcctgtccagttcttagacacactctgcacctttgcgaagttgagaaatctcacactacacacacaaactacactagacgttttcgaggacatcgaaccgaacttggaccctgactacgatcacgcattgtccatattccgactcttgtatcgacggaagcagcccgcatcgtggaaatcgatcactatcaacgtaggaggctggaaacgagtcatggtgcgcagactgtctgccccctggcgtgagcaaaacgctcaaggtgtatttgcggaacgatgttttgtgctcgagaggacggaagacgggcgttaccaagtggacgagaagatacctgctgaggtttcttag

SEQ ID NO: 39998 - protein, 397 aa, Muscodor strobelii
  misc_feature: SGI Peptide ID NO. 573932
  misc_feature (11)..(395): NCBI GI: 256734261 Blast Desc: NECHADRAFT_67705 [Nectria haematococca mpVI 77-13-4]
  misc_feature (11)..(395): NCBI GI: 46130642 Blast Desc: FG08925.1 [Gibberella zeae PH-1]
  misc_feature (43)..(397): NCBI GI: 145609842 Blast Desc: MGG_02942 [Magnaporthe grisea 70-15] gi|145017226|gb|EDK01589.1| MGG_02942 [Magnaporthe grisea 70-15]
  misc_feature (43)..(397): NCBI GI: 149210479 Blast Desc: MGCH7_ch7g714 [Magnaporthe grisea 70-15] gi|86196669|gb|EAQ71307.1| MGCH7_ch7g714 [Magnaporthe grisea 70-15]
  misc_feature (85)..(385): NCBI GI: 85111801 Blast Desc: NCU01926 [Neurospora crassa OR74A] gi|28925877|gb|EAA34874.1| [Neurospora crassa OR74A]
  misc_feature (43)..(159): NCBI GI: 171676181 Blast Desc: protein product [Podospora anserina] gi|170936156|emb|CAP60816.1| protein product [Podospora anserina]
MIRDQELKGCIRWRYLESGLRKGGFWVPSEMLTSRHLQVNRIKLHIENLPLRDFRAEQYNPYLRAIPAAALTSLHVAIPTPPLTARLETLKGLLLESHQLQTFSLGDRGQGTQFSFTNHERLPAFTNLSLRSYDWDHSWGEVARHWNFTKIKHLELIDVPLYPFFCSISFEDFQNLKSLQLDDFSTHLQNRRRETTEGQYYFIKRIRELVDLRITCQTLHFPVDGIIQHASSLQVLRLRDYTGFSDEYRRCPTIRLQDLQHLACTLSQLHTLEIDMDERLCDPVQFLDTLCTFAKLRNLTLHTQTTLDVFEDIEPNLDPDYDHALSIFRLLYRRKQPASWKSITINVGGWKRVMVRRLSAPWREQNAQGVFAERCFVLERTEDGRYQVDEKIPAEVS

SEQ ID NO: 39999 - DNA, 4058 bp, Muscodor strobelii
  misc_feature: SGI EST ID NO. CUFF.96621.0
  misc_feature: Variant of the nucleotide sequence at SEQ ID NO 39997
gccagctacaactgcgatgcaaaattacccgtccgtgatcctgggttgacaaggtgctttggggcttattcaacgcggctagtctcactaatgaatcagatgaagaagcagggctcaaacgtttgatattctgatttcatttgataatgtctcgcacaatttcccagaaccacagttttatcgtgtaagcagtggtttatgctgcccggcttatcgtacatgtcgcatgtgacaaaatgcggagtgcttgaactctaatgatcttgtctgttctcgtcttgtcgatggctgaggtcgctatctttggtagcctatacaacaatcacagcgatggagtaaatcaagttctctggagactgtgagtagggtgcatgtaactagaagtaaggcttctcggttattcagcagagggtaatcagcaatccatatatgaacacatgtcatcgaaaaatatgttccaccacatcccgctcctccaccatgttctcaagcgcttgcgttggccgcaatggcatcgcatttattagcaggtaccacagcgtcgagactgacagtgacttgactggtcgtaccatcggtccgctgcgacgcaactagtatgtgggcgacggcagggatgcaagcagagatcgctctccccgctagccccatgcaatttataacggtgtcggtcacgacagctcgagtcgggctattttaatacgcccatgcagaccgtttcgggacattgttgcgaatgatctgaagggagaattgatggtgaaattgccttcctcgcaaccaaatcagacgggcggctctcccttccatccatgtcgttctattggcctcagaccggctttcgggcgccgatgaacttgctgtgggcagcctggcatttgcctctaccaagttgcgcgccggaagcatcgaaacatttgacaccgcccgccgatgaaatacgatctaagagcatgtcgcattgcaacttgtgtcgatcatcgaccttgctctcgctccgagagcagccgctgatgatatcgacacaggtcaagcctcgtatcgcacaaactagtgattttcagaaatgctgcctgcggtacctggtactggtattacccctgctgaatatcccacgcgttttcatcccaacagtctatctcttgactctcttgcgaatgcgtgtcaccaagccgctccctcaagccattcgcgtcttatctgcatcgcaatctgcactcaaacgtggtccatccagctcatagcgttcagcatacgcaatcaggctcgtggcccaatagcactatgcactctccctgcaatacctccctatcgatgatgtgctgaggatcgccatgtagagccatgtagtccttggtctcatgcaaaccaccccatctgcgtctgaaactcgttatttttcccagaagaggtctagccgcatctatcaaagggtcttatttggtgcaatccacctaccggccgcacagctcattggctactccgtccaatatatcgacagcccacatgtgccgtcgaccgtctgatgatggaccgaacctcattgacagcatccggcgctccggttaagaccaacatgtatttcacactgtcgacaattctatttgctcagtaacttgctttgattctacatggtatatgcgaaaatcccactcctcatttcgttaccacagccacaaacttgcttatccaccggagcattttgatcacacatgtcctcgtgacgtacgccttgcacatgtaaataccgttctcgctttctacccattgaatcagtaatggatcatgctgagcttttgtgcatctctcgctgctcttttcattttccctcttacagatcgaggaggcgcaacggtgatgacaattgttgcatggcggcaccctcgctttctcgaggttctcagccaaggcgatctctagacgagctgagttcagagcttttgattttgatcctagaaagagtacgattaggcatatgagctacttccattacggccgagagacaaacatactaatgcgtcactttctagctgggagagatcgacacaaactcgctatcgacttgtcggaggctttcgaggaggttcaacgcgatcgtgaccccaataagatatcgtacgatccgcctgacaccaaaaatattgggtttccaaaagcatcaggagttctcacgtggccttgccagcatatgtcgacatacgagacatgtagaagtagagagcgacctagatcctcaccttgttggggcattcttaagcaaaattgaacgattgtcgtccgtgaggtggcggtacttggagagtggtcttcgcaagggcggtttttgggttccatcggagatgctcacttcacgacatctccaggtaaaccgcattaagttacatattgaaaatttaccccttagagacttcagagcggagcagtataacccatacttgagagctatcccagcagccgctctcacgtcactccatgtggccattccaacaccaccactcaccgctcgactagaaacgttgaaggggctgctgcttgaatcccatcaactccagacattctcactgggcgacagaggccaagggacgcagttttcattcaccaatcacgagcgactaccagcttttaccaacctatcgcttcgctcatacgattgggaccatagctggggtgaagttgctaggcactggaatttcacgaagatcaaacatctcgaattgattgatgtaccactatatccttttttctgctcaatatcgttcgaagattttcaaaatctcaaaagtctacaactagatgatttcagcacgcatctgcaaaacaggcgccgggagacgacagagggtcaatattatttcatcaagagaattagagagctggtagacttaaggattacttgccaaactttgcattttccagttgacggcataatccagcacgcaagctcgctacaggtcttgcgcctccgcgactacaccggattcagcgatgaataccgccgttgtcccacgataagactccaagatttgcagcacttggcgtgtaccctctcgcagctccatacactcgagatcgatatggacgagaggttatgtgatcctgtccagttcttagacacactctgcacctttgcgaagttgagaaatctcacactacacacacaaactacactagacgttttcgaggacatcgaaccgaacttggaccctgactacgatcacgcattgtccatattccgactcttgtatcgacggaagcagcccgcatcgtggaaatcgatcactatcaacgtaggaggctggaaacgagtcatggtgcgcagactgtctgccccctggcgtgagcaaaacgctcaaggtgtatttgcggaacgatgttttgtgctcgagaggacggaagacgggcgttaccaagtggacgagaagatacctgctgaggtttcttagcgacacttcgggcagggaagacgaaatcatctcgcgttctcatctagaaggcatgactggcggtgcttttcacgaccaattacgattaacgacatgaaaacaaagattcgagaataggcatactacaaaaatggaataaatggtagatggtacaataatacgtatccgggcaagggctgtctgtgggataaattctgtgtctaagggagatcgatcatgtagctagtgattcaagccttcgaattagattcaacagaaatctatgctacacggcaggcaataaatacatcgaaggtatatctcatctacatctctatcaaaacagcatcctgtctccatgtgcaataagaacagcagggtcagacagtccagctttacatccacctccccttatgctaactcataccacgaagacctgaactcataaataacccaatatcaagactatacaatcccgcaatcactttcactccatctttcgaccctcatttctactgcccacaagcgtagaacccaccctgcaccctgcttcaacaaccagtcctacgcatcccgcggataatccgctgcaacgctcttcacaacacaacttactacatgatgccacttactacg

SEQ ID NO: 40000 - DNA, 1569 bp, Muscodor strobelii
  misc_feature: SGI cDNA ID NO. 573933
  misc_feature: Encodes the peptide sequence at SEQ ID NO 40001
atgaaggctctcaagatgaacaaggtgcttcgcaccttcaccaggaaaaacactagcggacccgacatctcagccgattccgagagcgatgcgcctgaagccgtcgccaaacgcaatgtcaaatctttctgcgaatcatcccgagccaacggcgcacaaggcggcgatgaggtcctctacctgcccccgatcgtcgatgcagccgaatcctccccgagcgccgcgggcgagtgcgcctacctcatccgccagtatctgaaggacgactactggaaataccccgactaccagtacaacgccctcatgctcgtccgcatcctctccgacaacccgggcgagaccttcacgcgcaacatcgaccagaagttcgtcgagactacacagaagctgcttagagatggccgcgacgccagagtgcggcagatgctgatggagacgctgtcgtccttcgagaccaccaagttctacgacgacggcctgaagcctctgattgagatgtggaagtcggagaaggagaaggcccagaagagctcatcaaagtcaggccgcggtgccatcaacgccttccgagcaccgccggaccagcagatccgccaattccaaccaccacccgtctccgatgcgccatacgcccacagccgtgcccagaactattcttcacgaccctcccacagccgccgactgcccgatcccgtcgaactcgccagccgtctcgaggaagctcgcacctctgccaacctcctgaaacagatgtcggaagaaacgttacagcagatactcatgcagcaaggccacactgccgacatgttacgaagtgattacgtcgaaaatgacctgctcaaagaattctccgatcgatgccagaaagcgagtcgcagtatacaaggctacatgacagccgagaaccccgcgcccgatcacgagaccatgggatcgctcatcgataccaacgagacccttcaacaggcgctgacccagcaccaacgtaataccgccaaggcccagaagcgaattgccgagctagacgatggcgagaacctggtgggcacctttggagacatggatacgcatgaaaacgggctcggtatctcaagacgcgagtcaccacctttggccgctacgctgggtgctgggttgggtataagtagtagttccgcaggcgcatcaggttcagcccctcgccggcccaacgggaagggtaaagagcgagaatacgaccctccgtcagccgcgggcccatcgagatctcaatctcatacaccgctgggtgaagacccattccgggaccccgacgaagccgcgggatcaggcgcagcggccgccgcgtctggacatatgtttgacttggagccgccgttccacccggggttcaagaactcggctagttatatggggagacaggagagtgccgtgggaaaggaggcgatgcatggcgctgtggaggaggattacgcgcctcccccgggaccaccgaggggacatcgtgcggatgttagtgatgatgagagtgatggataccacgaccacgaccagcccaataaggacaagcagcccatgtatcgttattaa

SEQ ID NO: 40001 - protein, 522 aa, Muscodor strobelii
  misc_feature: SGI Peptide ID NO. 573933
  misc_feature (36)..(522): NCBI GI: 256734262 Blast Desc: NECHADRAFT_92156 [Nectria haematococca mpVI 77-13-4]
  misc_feature (40)..(522): NCBI GI: 46130644 Blast Desc: FG08926.1 [Gibberella zeae PH-1]
  misc_feature (1)..(482): NCBI GI: 154305613 Blast Desc: BC1G_07621 [Botryotinia fuckeliana B05.10] gi|150853140|gb|EDN28332.1| BC1G_07621 [Botryotinia fuckeliana B05.10]
  misc_feature (18)..(338): NCBI GI: 261353421 Blast Desc: conserved [Verticillium albo-atrum VaMs.102]
  misc_feature (1)..(339): NCBI GI: 164429556 Blast Desc: NCU01927 [Neurospora crassa OR74A] gi|157073527|gb|EAA34875.2| [Neurospora crassa OR74A]
  misc_feature (1)..(337): NCBI GI: 39970949 Blast Desc: MGG_02941 [Magnaporthe grisea 70-15] gi|145017229|gb|EDK01592.1| MGG_02941 [Magnaporthe grisea 70-15]
  misc_feature (1)..(337): NCBI GI: 149210475 Blast Desc: MGCH7_ch7g712 [Magnaporthe grisea 70-15] gi|86196667|gb|EAQ71305.1| MGCH7_ch7g712 [Magnaporthe grisea 70-15]
  misc_feature (1)..(522): NCBI GI: 116193797 Blast Desc: CHGG_06616 [Chaetomium globosum CBS 148.51] gi|88182529|gb|EAQ89997.1| CHGG_06616 [Chaetomium globosum CBS 148.51]
  misc_feature (25)..(346): NCBI GI: 225677633 Blast Desc: conserved [Paracoccidioides brasiliensis Pb03]
  misc_feature (16)..(486): NCBI GI: 169598162 Blast Desc: SNOG_01879 [Phaeosphaeria nodorum SN15] gi|111068971|gb|EAT90091.1| SNOG_01879 [Phaeosphaeria nodorum SN15]
MKALKMNKVLRTFTRKNTSGPDISADSESDAPEAVAKRNVKSFCESSRANGAQGGDEVLYLPPIVDAAESSPSAAGECAYLIRQYLKDDYWKYPDYQYNALMLVRILSDNPGETFTRNIDQKFVETTQKLLRDGRDARVRQMLMETLSSFETTKFYDDGLKPLIEMWKSEKEKAQKSSSKSGRGAINAFRAPPDQQIRQFQPPPVSDAPYAHSRAQNYSSRPSHSRRLPDPVELASRLEEARTSANLLKQMSEETLQQILMQQGHTADMLRSDYVENDLLKEFSDRCQKASRSIQGYMTAENPAPDHETMGSLIDTNETLQQALTQHQRNTAKAQKRIAELDDGENLVGTFGDMDTHENGLGISRRESPPLAATLGAGLGISSSSAGASGSAPRRPNGKGKEREYDPPSAAGPSRSQSHTPLGEDPFRDPDEAAGSGAAAAASGHMFDLEPPFHPGFKNSASYMGRQESAVGKEAMHGAVEEDYAPPPGPPRGHRADVSDDESDGYHDHDQPNKDKQPMYRY

SEQ ID NO: 40002 - DNA, 2518 bp, Muscodor strobelii
  misc_feature: SGI EST ID NO. CUFF.96655.3
  misc_feature: Variant of the nucleotide sequence at SEQ ID NO 40000
cgggtatccaccccagacagaagtactgagagctccgggtcaagtacaggaccccacgcgtcaaggtcctcttggtcccactgatgactgcatcgaatggataattatggccggatatggcagactaaggaagatgggagactaatgtcgatgggtgtgcgactgtgcgaatacaagtcaagtcgtgataaagtgtaggggtctccagttgcaatggttgaaatgggaagctagaaggacgttgcctcgttccccttgccctcgcttctgcccctgagccaacaaacatctgcagcgaaagcgacacagcagatacacaaaacaccgggaacacagacccgtgtcgtccaacaggcagccccaacgggacagagactcttttattttatttcgcgagtgtcactgtcgtcgagtccggaataggagaagcaacagtgaagccagctgttcttaattctcatctctttctcaagttcaaatcgtcattcttctgacctggaattattggcgccgagatatcccctgcccgccgggcctaccaactctacagtttagattttgtcgcaaaacaccccggcacccatccgtatctaggcgacagatccaggacaaccacccaagcgccagtttcaggagagctctcgaagctttcggcatctcaacctcacatcacatcgctgtcttttgtacatatctctcttccagcgatctctgccgacctacaagccagacttgttgcgatgaaggctctcaagatgaacaaggtgcttcgcaccttcaccaggaaaaacactagcggacccgacatctcagccgattccgagagcgatgcgcctgaagccgtcgccaaacgcaatgtcaaatctttctgcgaatcatcccgagccaacggcgcacaaggcggcgatgaggtcctctacctgcccccgatcgtcgatgcagccgaatcctccccgagcgccgcgggcgagtgcgcctacctcatccgccagtatctgaaggacgactactggaaataccccgactaccagtacaacgccctcatgctcgtccgcatcctctccgacaacccgggcgagaccttcacgcgcaacatcgaccagaagttcgtcgagactacacagaagctgcttagagatggccgcgacgccagagtgcggcagatgctgatggagacgctgtcgtccttcgagaccaccaagttctacgacgacggcctgaagcctctgattgagatgtggaagtcggagaaggagaaggcccagaagagctcatcaaagtcaggccgcggtgccatcaacgccttccgagcaccgccggaccagcagatccgccaattccaaccaccacccgtctccgatgcgccatacgcccacagccgtgcccagaactattcttcacgaccctcccacagccgccgactgcccgatcccgtcgaactcgccagccgtctcgaggaagctcgcacctctgccaacctcctgaaacagatgtcggaagaaacgttacagcagatactcatgcagcaaggccacactgccgacatgttacgaagtgattacgtcgaaaatgacctgctcaaagaattctccgatcgatgccagaaagcgagtcgcagtatacaaggctacatgacagccgagaaccccgcgcccgatcacgagaccatgggatcgctcatcgataccaacgagacccttcaacaggcgctgacccagcaccaacgtaataccgccaaggcccagaagcgaattgccgagctagacgatggcgagaacctggtgggcacctttggagacatggatacgcatgaaaacgggctcggtatctcaagacgcgagtcaccacctttggccgctacgctgggtgctgggttgggtataagtagtagttccgcaggcgcatcaggttcagcccctcgccggcccaacgggaagggtaaagagcgagaatacgaccctccgtcagccgcgggcccatcgagatctcaatctcatacaccgctgggtgaagacccattccgggaccccgacgaagccgcgggatcaggcgcagcggccgccgcgtctggacatatgtttgacttggagccgccgttccacccggggttcaagaactcggctagttatatggggagacaggagagtgccgtgggaaaggaggcgatgcatggcgctgtggaggaggattacgcgcctcccccgggaccaccgaggggacatcgtgcggatgttagtgatgatgagagtgatggataccacgaccacgaccagcccaataaggacaagcagcccatgtatcgttattaaggggagagagaacagtggacagccactgaggggagggatgggagagaagagagggacaccctttgttgagcgcactgagaggacggaagataccatgattgttgttggagtactcagtaccctttgtcgttagagccatgttgatatcatagtctgagagacgggttgtatgaagatggaaatgagaaaagaataaaaattacccccta

SEQ ID NO: 40003 - DNA, 2493 bp, Muscodor strobelii
  misc_feature: SGI cDNA ID NO. 573934
  misc_feature: Encodes the peptide sequence at SEQ ID NO 40004
atggagtcacttgcaactttgtcgccgccgcgtgacctctcttctgaggctagcttcggcccaccgccagacgtgtactccaatgtcgcgtcgttgagctcaacaccgccgaccactgttgctgacgacgcaagcctggcctcggacactcctaagaatgataatacgacttcaattgaggttgtaaatactactactgaatctgtcaccatcaaggaccagccccaggccgcagattcgattgtcattacgaccgcgacgaccgagattattactgcacctgttcccacagaaccctctgaagtcgcgcgccctactaccgccgacggttcgctcgctgtaacaactccgaacacgcccaagtccgatcgtccacggcgcagtcgcctcagcgcccccatttacaacatttcccaactcgctggcactgccggtcacggtaaaagacgggccaaaggagacattgtagttgaccgcaagagacgccccaaatccagctcgtctgcagacggtgcaggcactccagcccagaatgcgggaaccccagtcaaagacaccatccacgcgtccgatgcgcgaatctcagcacgcgccactgaatctccaaagggcaagcttgcgaagaaagtgagagatgagcctcgacgcattgctactcgtaaatctggcattgaagccgagactctcgccacgaagctccagagcttgggcaagcgaagcaggaagaccttcgagaagggtattactcgaatgtcacgtgaacttaggcgcctgcaagacaccaatgaattttcgggtattgatacgcgaccagtcctatatacgacttgggcgaatggaaagtatgtagacccttctgctccggagcccgaagccgaggaacctccagcaaagaaggcaaagactcaggacgcttctgcatatgatgttccagacatggaagaagctattgctgaagagcctgtcccgaagaagcgccagcccaagaagtggctagatcgtggactgtatgctgggcagcaagcccccaccgacatcttcaagggtctcacagccaacgagaagaagaagttggcacaattgccagagctggctccgagtgcaacgctcaacaagactttgccacagcccatgtttgtggggttgcgcatgctgattgagggtcgcgattttaagctgcctttcgatatctgcaacccactgccacctggacagccaaagcctgatgaatggaggaaaatgacaaagaaccgatttgtgggtgatgcgggagcttactggaagaagaccccgcatttcaaggactaccagtccaaatgtgtctgcactcctgaagacggttgtggtgaaagctgccagaatagaattatgctttatgagtgtgattcgacgaattgcaatatcggcgacgatcggtgtcagaaccgagcatttgctaaattgactgagcgtgtcaaggcgggcggcaagttccgagtcggcgtagaagtcatcaagaccgccaacagaggctatggcatccgcgctaaccgttgcttcgctgcaaaccaaatcatcatggaatatacaggtgagattatcactgaggaggagtgtgatcgccgcatgaatgagaagtataaagacaatgagtgttattatcttatgtccttcgaccaaaacatgattatcgacgcgacgactggtagcatcgctcgttttgtcaatcactcatgccagccaaattgccgcatggtcaaatggatagtttctggacaacctcggatggctctctttgcaggggacaaagatatcatgaccggtgacgaactcacatacgactacaactttgaccctttttcagctaagaacgtgcaaaagtgtctctgtggtagctccaattgccgtggcgtccttgggcccaagcccaaagaagtcaagcctcccaagccttccaaggaagagttggccaaagcagtgaagaagactgtgaaggcaggcaagcggaagctgaaggaagtgcttagtgatctcaacgcttccgagggcagcgcaaccaaaaagcgcaagatgaaggctgccaccggcgtaaagggtgtgaaacgatctaccagcctcaaggccgctaccaagacggccgcaactaagatcaagcgcagtgtgtcaaccgtttcgttgaacagcaagaccaagaagactaaggccaaagccaagacacctcgcagaatcgccacagtcaagacatcgaagactgtcatgaagacatacggtaagaccaagtcgccggcgaagaagactgcgtccaagaaactcaccaagactcctcgcgcggctgcaaagaaaacggtcatacgtagaacaagccttagcattgctgcagcaggagccgagaacgtgaagcccagcaagacggcttcctccccggccagagcagccagtgctaggagagcgtcatcttcacccagaaaagccgtggagcttcctcgaatcaaacttgtcaactcggcttcttag

SEQ ID NO: 40004 - protein, 830 aa, Muscodor strobelii
  misc_feature: SGI Peptide ID NO. 573934
  misc_feature (487)..(615): Pfam Id: PF00856 Pfam Desc: SET domain
  misc_feature (28)..(808): NCBI GI: 116193789 Blast Desc: CHGG_06612 [Chaetomium globosum CBS 148.51] gi|88182525|gb|EAQ89993.1| CHGG_06612 [Chaetomium globosum CBS 148.51]
  misc_feature (13)..(762): NCBI GI: 46130624 Blast Desc: FG08916.1 [Gibberella zeae PH-1]
  misc_feature (12)..(749): NCBI GI: 256734254 Blast Desc: NECHADRAFT_123121 [Nectria haematococca mpVI 77-13-4]
  misc_feature (13)..(751): NCBI GI: 171676169 Blast Desc: protein product [Podospora anserina] gi|170936150|emb|CAP60810.1| protein product [Podospora anserina]
  misc_feature (216)..(789): NCBI GI: 164429563 Blast Desc: NCU01932 [Neurospora crassa OR74A] gi|157073530|gb|EAA34880.2| [Neurospora crassa OR74A]
  misc_feature (78)..(751): NCBI GI: 156056575 Blast Desc: SS1G_04018 [Sclerotinia sclerotiorum 1980] gi|154701804|gb|EDO01543.1| SS1G_04018 [Sclerotinia sclerotiorum 1980]
  misc_feature (13)..(738): NCBI GI: 39970941 Blast Desc: MGG_02937 [Magnaporthe grisea 70-15] gi|145017234|gb|EDK01597.1| MGG_02937 [Magnaporthe grisea 70-15]
  misc_feature (13)..(714): NCBI GI: 149210465 Blast Desc: MGCH7_ch7g707 [Magnaporthe grisea 70-15] gi|86196662|gb|EAQ71300.1| MGCH7_ch7g707 [Magnaporthe grisea 70-15]
  misc_feature (206)..(773): NCBI GI: 242813250 Blast Desc: histone-lysine N-methyltransferase (Ash1), [Talaromyces stipitatus ATCC 10500] gi|218714468|gb|EED13891.1| histone-lysine N-methyltransferase (Ash1), [Talaromyces ATCC
  misc_feature (203)..(747): NCBI GI: 119493172 Blast Desc: histone-lysine N-methyltransferase (Ash1), [Neosartorya fischeri NRRL 181] gi|119411965|gb|EAW21908.1| histone-lysine N-methyltransferase (Ash1), [Neosartorya fischeri
MESLATLSPPRDLSSEASFGPPPDVYSNVASLSSTPPTTVADDASLASDTPKNDNTTSIEVVNTTTESVTIKDQPQAADSIVITTATTEIITAPVPTEPSEVARPTTADGSLAVTTPNTPKSDRPRRSRLSAPIYNISQLAGTAGHGKRRAKGDIVVDRKRRPKSSSSADGAGTPAQNAGTPVKDTIHASDARISARATESPKGKLAKKVRDEPRRIATRKSGIEAETLATKLQSLGKRSRKTFEKGITRMSRELRRLQDTNEFSGIDTRPVLYTTWANGKYVDPSAPEPEAEEPPAKKAKTQDASAYDVPDMEEAIAEEPVPKKRQPKKWLDRGLYAGQQAPTDIFKGLTANEKKKLAQLPELAPSATLNKTLPQPMFVGLRMLIEGRDFKLPFDICNPLPPGQPKPDEWRKMTKNRFVGDAGAYWKKTPHFKDYQSKCVCTPEDGCGESCQNRIMLYECDSTNCNIGDDRCQNRAFAKLTERVKAGGKFRVGVEVIKTANRGYGIRANRCFAANQIIMEYTGEIITEEECDRRMNEKYKDNECYYLMSFDQNMIIDATTGSIARFVNHSCQPNCRMVKWIVSGQPRMALFAGDKDIMTGDELTYDYNFDPFSAKNVQKCLCGSSNCRGVLGPKPKEVKPPKPSKEELAKAVKKTVKAGKRKLKEVLSDLNASEGSATKKRKMKAATGVKGVKRSTSLKAATKTAATKIKRSVSTVSLNSKTKKTKAKAKTPRRIATVKTSKTVMKTYGKTKSPAKKTASKKLTKTPRAAAKKTVIRRTSLSIAAAGAENVKPSKTASSPARAASARRASSSPRKAVELPRIKLVNSAS

SEQ ID NO: 40005 - DNA, 5850 bp, Muscodor strobelii
  misc_feature: SGI EST ID NO. CUFF.96652.0
  misc_feature: Variant of the nucleotide sequence at SEQ ID NO 40003
tatcggagtccactaatgagaaacgctttcagcattccatatggcactacgctgtcagtgaccaacactcaagaggaggtgctatattgccactctcggttcctttaagacttcattcccatcaatgctcaaaatacagtcgggtaatgttgggtctccgccgcgctactctctagccacaggcgcaagggtagatagtgatcattgggactgcacctgggcttgtttaaaaatgagatgtacgaagtctgtagtccttactattcatatggtttttgtgtttatctagcagcatcaacgaataacgtgtgcagtataactgccatctggagaagacggtcgctctttgtccgcctatcaaacaattctttatatggatgaaggatggtgttgtacaagttgctacctgtttttctttgttcatcttcgcccatattgcacactgcatcaatcacagcacatgcggattccggtctggcatgaatgacagcagaagttgtagtgtacacctgtgacaggtggttcactttgacgtataccaggctagtggctgatgttcatggggccaagcgttccagtaactcctccgtatcatcagcgctgccaaggtaagatgttccaagtaacatggacacaaaaacctgatgtggtaagatgacaatatgatcttttcggaggaggcatcgtcgtggtccgagtatagtcgttcgaaggaatgtaagtcatctctgaccgttgtctggccctgtagctattcatggagatggcacgttcgatgttgaaacgaggtacaaggctggatcacatgtgcacatccaaggaagtgtagagcagcaatcagagaagtcgaagtagaccacggttctgacaaagcatagaaattcgtaggcaaagcgagggagagaatgaatagcgaaagtcccagcaatcccatctccattccccgttttgctctgagcacctgcaaactgtccgtattcctccatcccaaactgaccaaccttgtcaagtcaacctacccacttccactcattctagtgtctgcatctcctcccactccaattctcaccacctactcggcataattcatcattctgtcatcacttcacctctgctcggtcagcgccagctcgcagtgacatttcggctgagctcttcattttcttctgtgttcatacactggatgtatatagcccgcagctgagaaatccatctccactgcggtgctctcggctcatcaagcccgattgcctcctaattcactgtctagcctcagcttatcactgcttctcagcgtcgaccctgcagaccgtgatcacacacacaacccaacactctaatcgcacacaagctcaagcattcactacttctccttcactccgcacaacccttccgcccgcctagcaaaacaagtgctaccccagaccaggcaagaagttagggtagcaggctcgaatcctgaataattctttcaccttctctcaacccaccgtagtcttttgccactttggcgtcctaggtgtattcttcgtctgcactctctcagcgtcaactcccgggctgcacttggcaacctttctcaggaatacaccaataatcaaatcacaccactcttccactctatatcctcttcgcctgtagagatcacgttggttcgttcacacatttggcccagatcattactcagttgtaagatcgcctcaatttcagcaacccaccaaagagccactctacttggcgactggttgttagatttgtgatctcagcatcctcactcggcactgagcacctcagtcaccaacccgagacaatcattcaaaccaccagcttcatcagtctcgcggagaaggttactttgatatcaagttcgcagagatctcacccttgtcgatctagagcacaagcggacacagtctagacctgcgctccctcctcacattcaacagaaagcatcacaggtcggagtttgttgtcgtccacaccgatcacccccagaactcatcgcctccccctgacctcagaacactttgcctgatgacagtcagaggaacatctccatccacacacatctcggtacactgagccaacacaagcttacatcagatcgtgattccccttctctgcaaccaattcacgtatcgaagatactctcacctgagggaatcgatatttatccaccttggtattcatgcgctcagaaataggagagtgtagtttgactttgcacgcgactcccctgcatgtctacggaggatccgggtttatcaggccagccaaactcaatccgagccaacgaagagtgcgagacttgggccgtctttatctctctgactagagtcccgcttctcacattccaggacccgaggcaacaaatatctctctccctccgtccacagagttccagcggctgaatccttctctttcctatcattcattgacatttggggcacatccccatccccatccccaatccctcacgcatacaccgcacacggcacacggactctccttgtttctccacccaacccatacacccaatacccattccgcattcccatatccagtcagtcatacccgtacccgcggccaatccgcccgctcttggccgaccctgcataacacttgcacctcttaaaaacaacaccgacgcgtccaatccacactatcacgacatccaccgccgcggtgaacagccacccacctcaagtgaaagagataagttgcatcacaattggcgcgtcggccaagatggagtcacttgcaactttgtcgccgccgcgtgacctctcttctgaggctagcttcggcccaccgccagacgtgtactccaatgtcgcgtcgttgagctcaacaccgccgaccactgttgctgacgacgcaagcctggcctcggacactcctaagaatgataatacgacttcaattgaggttgtaaatactactactgaatctgtcaccatcaaggaccagccccaggccgcagattcgattgtcattacgaccgcgacgaccgagattattactgcacctgttcccacagaaccctctgaagtcgcgcgccctactaccgccgacggttcgctcgctgtaacaactccgaacacgcccaagtccgatcgtccacggcgcagtcgcctcagcgcccccatttacaacatttcccaactcgctggcactgccggtcacggtaaaagacgggccaaaggagacattgtagttgaccgcaagagacgccccaaatccagctcgtctgcagacggtgcaggcactccagcccagaatgcgggaaccccagtcaaagacaccatccacgcgtccgatgcgcgaatctcagcacgcgccactgaatctccaaagggcaagcttgcgaagaaagtgagagatgagcctcgacgcattgctactcgtaaatctggcattgaagccgagactctcgccacgaagctccagagcttgggcaagcgaagcaggaagaccttcgagaagggtattactcgaatgtcacgtgaacttaggcgcctgcaagacaccaatgaattttcgggtattgatacgcgaccagtcctatatacgacttgggcgaatggaaagtatgtagacccttctgctccggagcccgaagccgaggaacctccagcaaagaaggcaaagactcaggacgcttctgcatatgatgttccagacatggaagaagctattgctgaagagcctgtcccgaagaagcgccagcccaagaagtggctagatcgtggactgtatgctgggcagcaagcccccaccgacatcttcaagggtctcacagccaacgagaagaagaagttggcacaattgccagagctggctccgagtgcaacgctcaacaagactttgccacagcccatgtttgtggggttgcgcatgctgattgagggtcgcgattttaagctgcctttcgatatctgcaacccactgccacctggacagccaaagcctgatgaatggaggaaaatgacaaagaaccgatttgtgggtgatgcgggagcttactggaagaagaccccgcatttcaaggactaccagtccaaatgtgtctgcactcctgaagacggttgtggtgaaagctgccagaatagaattatgctttatgagtgtgattcgacgaattgcaatatcggcgacgatcggtgtcagaaccgagcatttgctaaattgactgagcgtgtcaaggcgggcggcaagttccgagtcggcgtagaagtcatcaagaccgccaacagaggctatggcatccgcgctaaccgttgcttcgctgcaaaccaaatcatcatggaatatacaggtgagattatcactgaggaggagtgtgatcgccgcatgaatgagaagtataaagacaatgaggtaagttgagcgcctgttaagagtgagaaggtaccaagactgacgaatttagtgttattatcttatgtccttcgaccaaaacatgattatcgacgcgacgactggtagcatcgctcgttttgtcaatcactcatgccagccaaattgccgcatggtcaaatggatagtttctggacaacctcggatggctctctttgcaggggacaaagatatcatgaccggtgacgaactcacatacgactacaactttgaccctttttcagctaagaacgtgcaaaagtgtctctgtggtagctccaattgccgtggcgtccttgggcccaagcccaaagaagtcaagcctcccaagccttccaaggaagagttggccaaagcagtgaagaagactgtgaaggcaggcaagcggaagctgaaggaagtgcttagtgatctcaacgcttccgagggcagcgcaaccaaaaagcgcaagatgaaggctgccaccggcgtaaagggtgtgaaacgatctaccagcctcaaggccgctaccaagacggccgcaactaagatcaagcgcagtgtgtcaaccgtttcgttgaacagcaagaccaagaagactaaggccaaagccaagacacctcgcagaatcgccacagtcaagacatcgaagactgtcatgaagacatacggtaagaccaagtcgccggcgaagaagactgcgtccaagaaactcaccaagactcctcgcgcggctgcaaagaaaacggtcatacgtagaacaagccttagcattgctgcagcaggagccgagaacgtgaagcccagcaagacggcttcctccccggccagagcagccagtgctaggagagcgtcatcttcacccagaaaagccgtggagcttcctcgaatcaaacttgtcaactcggcttcttagctagccgaccccttgctttcaagtttctttcaacacgagaacttgcaagctcagcatctaagttaggatcatggagctagatattgtaccatcaccaatagcaatgtgtcggctctttttgaagcgattggctgacaccgttgcacttgggacaagttcgtgaggccatttcgtgcttcaatacgcgatggcttggagacgggctgtgttcgacgtctcacagctgcatatgtatgagtattcaacacgagtggaggcaacaaaccctaggcctccaaactcacatgtgtataataatctacccttttcttttcctgtctactagtcctgcaccggtgcttttcccgcgagaggatggcatctggcgagaggtgccacaggggcgatggaggggcatagaggcggaaaagcccccgcacgaaacatggaaacatggatatgggacggtgaagggcgtttggcgtatgtaatcgggtcatggactactttgagtcggtatctgtattgatcttgttatctatattttcgttgcgttttatgtgaaaagtgaagtaaag

SEQ ID NO: 40006 - DNA, 2091 bp, Muscodor strobelii
  misc_feature: SGI cDNA ID NO. 573935
  misc_feature: Encodes the peptide sequence at SEQ ID NO 40007
atggcggaccacaatttctcgcgttacatatccagcttctggtcggcggtgtttgcaccttttactttcctctacactcgcatcttgcactccttcacttcaaatacagcaaaagcatctgatacatctttgatatccggaaaccaccagtcccagtcttcatcgccactgccactgcccgagcacccgactgcctctgtacttgaacctgcacctgcacctgcatttgcgtcctcactgcaagccagctctcccggtcctctctcatctgttgattccgttcccctgcaacaccaaaacctgtcacacaccactgttgccggagaattgctagacgatcaaggccctgctgctgccaacgctcaagggccaggtaattccgaccttgcagacttggttcagcttcccgagcagaaacacaccgtttcttcatctctacacattaaaaatcaccttgccgaagacatgtccaataaacgtggcggcaagaaacgtggccgtcaggccaagaactctgcccaccgccctgtcgctgtcactcctgtcactcccgtcacagatgtccctgttatcacagacgccaccaataccaccaaagaccggcccgcttctgctggccactcagagaccaataccaatggtaacaccagatccaatccgaaccacgcagatggcaccaagaccgccttaacttctaagaaacaaggagcttctcaaaactcccatcggccatcttccctgaagccgggacattctgataatcgaaaagagaataacactcctcttaccgatgatgttaatgcatctcgagctaccaactcggaccctgccgcatccaagcccctcgccgctgtggacaacgccagcgagcctgagagatcgggtacccgcagccagggcatggttgaatccggtgctcagcctgcagtcaagagtatgtgtgatggcagctccacaggcgtcaatgatgtcggcaaactcactgcaattgccaatcgtctcaccttagaagacgtctcccagtcacaagagtccgggcagcagcagactctcaacgaagccaccactgcagctgagacgtcggctttgccagtccctctggttgtcgcaatccctcttccgcctaatgcacctactgctgagcccgaagcgccaccaactccgcttctgcccggcttgattgagcctcaaacggacgaggagagagcagaaagagagtatcatcttaagtacatgcgtgaagcccttgacatgggctttttagctcttaacaccaatgagacacctgttggctgtgtccttgtttaccatggaaggacgattgctaagggaatgaacgcgaccaatatcacgcgcaatggtacacgccatgctgagttcatggcgttatcagctttgctttctcgaagatctcccagcgacgtcaaagtgttgaacggcaacccgcactttgacgatgcgtgctggggtgatgttgatccgaaagatggccacatttacccctatggacagaagctacaccccgcacctgtagttgaccgctccatcatctctgaatgcgtcttatatgttacagttgaaccttgcgtcatgtgcgcctctcttctccgtcagctcggtatcaagaaggtctatttcggtgctgtcaacgacaagtttggaggtacagggggcgttttccgtgttcatatgaactcgaagcctgttcccagacccaatgggcggccttatcagcaaggctacggccctcaggatgttgaccgaatttacaaaggcaaagctgtggcagtgccccgcgatgaagatgatggcgatggcggtaatgttgaacggggctatccagttgaaggtggttaccttcgtgacgatgccgtatctttacttcgacgattttacgtgcaggagaacggccgagccccacaaccccgcaaaaaagaaggcagagctgcccgcctgtatgctgccatggagggccagaagaatgagaacggtgttggcgaatgcgagaacgccccggagacacctgttgataatgaaccgatcacggagctaagtgaacttcctccgactgtcactacggcctgcgcttaa

SEQ ID NO: 40007 - protein, 696 aa, Muscodor strobelii
  misc_feature: SGI Peptide ID NO. 573935
  misc_feature (405)..(548): Pfam Id: PF00383 Pfam Desc: Cytidine and deoxycytidylate deaminase zinc-binding region
  misc_feature (395)..(657): NCBI GI: 85118833 Blast Desc: NCU01888 [Neurospora crassa OR74A] gi|28927329|gb|EAA36283.1| [Neurospora crassa OR74A]
  misc_feature (397)..(657): NCBI GI: 116193885 Blast Desc: CHGG_06660 [Chaetomium globosum CBS 148.51] gi|88182573|gb|EAQ90041.1| CHGG_06660 [Chaetomium globosum CBS 148.51]
  misc_feature (376)..(688): NCBI GI: 256733779 Blast Desc: NECHADRAFT_67750 [Nectria haematococca mpVI 77-13-4]
  misc_feature (382)..(661): NCBI GI: 46140151 Blast Desc: FG11590.1 [Gibberella zeae PH-1]
  misc_feature (393)..(687): NCBI GI: 171676245 Blast Desc: protein product [Podospora anserina] gi|170936188|emb|CAP60848.1| protein product [Podospora anserina]
  misc_feature (391)..(666): NCBI GI: 261353388 Blast Desc: conserved [Verticillium albo-atrum VaMs.102]
  misc_feature (392)..(600): NCBI GI: 39970877 Blast Desc: MGG_02905 [Magnaporthe grisea 70-15] gi|149210385|ref|XP_001522567.1| MGCH7_ch7g670 [Magnaporthe grisea 70-15] gi|86196625|gb|EAQ71263.1| MGCH7_ch7g670 grisea
  misc_feature (412)..(652): NCBI GI: 154305221 Blast Desc: BC1G_08905 [Botryotinia fuckeliana B05.10] gi|150853647|gb|EDN28839.1| BC1G_08905 [Botryotinia fuckeliana B05.10]
  misc_feature (404)..(648): NCBI GI: 169599362 Blast Desc: SNOG_02499 [Phaeosphaeria nodorum SN15] gi|111069591|gb|EAT90711.1| SNOG_02499 [Phaeosphaeria nodorum SN15]
  misc_feature (404)..(648): NCBI GI: 189204912 Blast Desc: tRNA-specific adenosine deaminase subunit TAD2 [Pyrenophora tritici-repentis Pt-1C-BFP] gi|187985890|gb|EDU51378.1| tRNA-specific adenosine deaminase
MADHNFSRYISSFWSAVFAPFTFLYTRILHSFTSNTAKASDTSLISGNHQSQSSSPLPLPEHPTASVLEPAPAPAFASSLQASSPGPLSSVDSVPLQHQNLSHTTVAGELLDDQGPAAANAQGPGNSDLADLVQLPEQKHTVSSSLHIKNHLAEDMSNKRGGKKRGRQAKNSAHRPVAVTPVTPVTDVPVITDATNTTKDRPASAGHSETNTNGNTRSNPNHADGTKTALTSKKQGASQNSHRPSSLKPGHSDNRKENNTPLTDDVNASRATNSDPAASKPLAAVDNASEPERSGTRSQGMVESGAQPAVKSMCDGSSTGVNDVGKLTAIANRLTLEDVSQSQESGQQQTLNEATTAAETSALPVPLVVAIPLPPNAPTAEPEAPPTPLLPGLIEPQTDEERAEREYHLKYMREALDMGFLALNTNETPVGCVLVYHGRTIAKGMNATNITRNGTRHAEFMALSALLSRRSPSDVKVLNGNPHFDDACWGDVDPKDGHIYPYGQKLHPAPVVDRSIISECVLYVTVEPCVMCASLLRQLGIKKVYFGAVNDKFGGTGGVFRVHMNSKPVPRPNGRPYQQGYGPQDVDRIYKGKAVAVPRDEDDGDGGNVERGYPVEGGYLRDDAVSLLRRFYVQENGRAPQPRKKEGRAARLYAAMEGQKNENGVGECENAPETPVDNEPITELSELPPTVTTACA

SEQ ID NO: 40008 - DNA, 2953 bp, Muscodor strobelii
  misc_feature: SGI EST ID NO. CUFF.96640.0
  misc_feature: Variant of the nucleotide sequence at SEQ ID NO 40006
cagcctcataagttggcttatttgggcaattggcttgcatcgaaaggccaagcgccgcctctagtcctgctctgccattctgttaatgagcagtcgtgctttcttcagatcaagactcttttcagtcagcattctacctgcatctatctgcaatctacagcccatgccccaagtcctgcatggctagatctgtctacatagtcaatggcactagtaggagacttttcacctctatccaactgcactatttacagacttgagttgtccctactattgtcatataatagtcacgtccttaatctgtgacagcttcatattcacatcacatcacaataaccatttatcaatatagccatacaaagcactaaacaattacgtgtcctgcttcatggccccaattttgcttgtcagcgtgctggcatcgataatcatattagcatcggatagacccaaatactcactgagatttcagcattgctaaggaaggaacgatcaagcgggacaacgtaaagcagtcgcatattcaattcttcacattcaatacaaaggattggagggaaggtctgaggcagcgaccaaaagcagtcacaatggcggaccacaatttctcgcgttacatatccagcttctggtcggcggtgtttgcaccttttactttcctctacactcgcatcttgcactccttcacttcaaatacagcaaaagcatctgatacatctttgatatccggaaaccaccagtcccagtcttcatcgccactgccactgcccgagcacccgactgcctctgtacttgaacctgcacctgcacctgcatttgcgtcctcactgcaagccagctctcccggtcctctctcatctgttgattccgttcccctgcaacaccaaaacctgtcacacaccactgttgccggagaattgctagacgatcaaggccctgctgctgccaacgctcaagggccaggtaattccgaccttgcagacttggttcagcttcccgagcagaaacacaccgtttcttcatctctacacattaaaaatcaccttgccgaagacatgtccaataaacgtggcggcaagaaacgtggccgtcaggccaagaactctgcccaccgccctgtcgctgtcactcctgtcactcccgtcacagatgtccctgttatcacagacgccaccaataccaccaaagaccggcccgcttctgctggccactcagagaccaataccaatggtaacaccagatccaatccgaaccacgcagatggcaccaagaccgccttaacttctaagaaacaaggagcttctcaaaactcccatcggccatcttccctgaagccgggacattctgataatcgaaaagagaataacactcctcttaccgatgatgttaatgcatctcgagctaccaactcggaccctgccgcatccaagcccctcgccgctgtggacaacgccagcgagcctgagagatcgggtacccgcagccagggcatggttgaatccggtgctcagcctgcagtcaagagtatgtgtgatggcagctccacaggcgtcaatgatgtcggcaaactcactgcaattgccaatcgtctcaccttagaagacgtctcccagtcacaagagtccgggcagcagcagactctcaacgaagccaccactgcagctgagacgtcggctttgccagtccctctggttgtcgcaatccctcttccgcctaatgcacctactgctgagcccgaagcgccaccaactccgcttctgcccggcttgattgagcctcaaacggacgaggagagagcagaaagagagtatcatcttaagtacatgcgtgaagcccttgacatgggctttttagctcttaacaccaatgagacacctgttggctgtgtccttgtttaccatggaaggacgattgctaagggaatgaacgcgaccaatatcacgcgcaatggtacacgccatgctgagttcatggcgttatcagctttgctttctcgaagatctcccagcgacgtcaaagtgttgaacggcaacccgcactttgacgatgcgtgctggggtgatgttgatccgaaagatggccacatttacccctatggacagaagctacaccccgcacctgtagttgaccgctccatcatctctgaatgcgtcttatatgttacagttgaaccttgcgtcatgtgcgcctctcttctccgtcagctcggtatcaagaaggtctatttcggtgctgtcaacgacaagtttggaggtacagggggcgttttccgtgttcatatgaactcgaagcctgttcccagacccaatgggcggccttatcagcaaggctacggccctcaggatgttgaccgaatttacaaaggcaaagctgtggcagtgccccgcgatgaagatgatggcgatggcggtaatgttgaacggggctatccagttgaaggtggttaccttcgtgacgatgccgtatctttacttcgacgattttacgtgcaggagaacggccgagccccacaaccccgcaaaaaagaaggcagagctgcccgcctgtatgctgccatggagggccagaagaatgagaacggtgttggcgaatgcgagaacgccccggagacacctgttgataatgaaccgatcacggagctaagtgaacttcctccgactgtcactacggcctgcgcttaagcctgctgtgagaactgtctcttaccttttctttgtcgagactgtcatgaactagaggggagacactctgtacaagactagatctgcatcgacggcttacgatgttgcatgaagagctgcatggtcctggagtaccggtatttgttttctcaggaggttataccacacagggatcaaggtgcatcattccaggaggggtccctggaggataagcgggtaaaattagaagataatcatattgcattatcctgcaatccatctgtggctcgacc

SEQ ID NO: 40009 - DNA, 735 bp, Muscodor strobelii
  misc_feature: SGI cDNA ID NO. 573936
  misc_feature: Elevated expression when VOC is produced
  misc_feature: Encodes the peptide sequence at SEQ ID NO 40010
atgtctactgccgacactgcatcagtattttctcagtcgcgaacgttggttccgccaaaaccagtagtgcttcgcaggccgtctaaatatctcaaaaatccggtcacgccatacgataactacggaaagctttggcagcctccaccaagtgagtggatgttggatacttggaccgtaacatggtccactcagtccaattggcactctgccaaaaatgtacgcatctcgttctcgcctcaccattctatattgagcccgcactcgccgcctggctttgaaaaggccatcaaaatgaacagcaccctccgatatgaaagtaaagatggcataaaaacaatagatggcgttgaatggccagatccaatggtccctggagcatggcggtggcgtggtacaggctggaaagcaatcaaggctcgtcactggcaagttcttggttatggtgaggcactgccatggagtggctacgcccaagtgcgctggatggccgtctggtttcaagcaacgacaacaacaaacgaagcagttgagatttggtgcgatagagaggatggactcgccagggacgtttatgaagacattatcgcggggctaacgtccgcacatgcaccagcaatggtttatcagattgatacgaacatgaagcaagtcgctattgagaggccgaatgcaacagaagatggcactgcacgtgcgggacggagggacaggtgggcaggtgagcttatgatttga

SEQ ID NO: 40010 - protein, 244 aa, Muscodor strobelii
  misc_feature: SGI Peptide ID NO. 573936
  misc_feature (22)..(222): NCBI GI: 145606290 Blast Desc: MGG_02412 [Magnaporthe grisea 70-15] gi|145013990|gb|EDJ98631.1| MGG_02412 [Magnaporthe grisea 70-15]
  misc_feature (19)..(222): NCBI GI: 261356764 Blast Desc: conserved [Verticillium albo-atrum VaMs.102]
  misc_feature (26)..(220): NCBI GI: 156040413 Blast Desc: SS1G_12223 [Sclerotinia sclerotiorum 1980] gi|154696279|gb|EDN96017.1| SS1G_12223 [Sclerotinia sclerotiorum 1980]
  misc_feature (22)..(220): NCBI GI: 154320688 Blast Desc: BC1G_01816 [Botryotinia fuckeliana B05.10] gi|150853505|gb|EDN28697.1| BC1G_01816 [Botryotinia fuckeliana B05.10]
  misc_feature (21)..(222): NCBI GI: 46138773 Blast Desc: FG10901.1 [Gibberella zeae PH-1]
  misc_feature (18)..(222): NCBI GI: 85082036 Blast Desc: NCU03385 [Neurospora crassa OR74A] gi|28881160|emb|CAD70330.1| [Neurospora crassa] gi|28917911|gb|EAA27596.1| conserved [Neurospora crassa OR74A]
  misc_feature (21)..(222): NCBI GI: 171690182 Blast Desc: protein product [Podospora anserina] gi|170945039|emb|CAP71150.1| protein product [Podospora anserina]
  misc_feature (38)..(198): NCBI GI: 145241069 Blast Desc: An08g10770 [Aspergillus niger] gi|134077710|emb|CAK45750.1| protein product [Aspergillus niger]
  misc_feature (67)..(222): NCBI GI: 256729073 Blast Desc: NECHADRAFT_39825 [Nectria haematococca mpVI 77-13-4]
  misc_feature (48)..(198): NCBI GI: 255945635 Blast Desc: Pc20g10960 [Penicillium chrysogenum Wisconsin 54-1255] gi|211588320|emb|CAP86425.1| Pc20g10960 [Penicillium chrysogenum Wisconsin 54-1255]
  misc_feature: Useful for introducing or modulating the production of volatile compounds
MSTADTASVFSQSRTLVPPKPVVLRRPSKYLKNPVTPYDNYGKLWQPPPSEWMLDTWTVTWSTQSNWHSAKNVRISFSPHHSILSPHSPPGFEKAIKMNSTLRYESKDGIKTIDGVEWPDPMVPGAWRWRGTGWKAIKARHWQVLGYGEALPWSGYAQVRWMAVWFQATTTTNEAVEIWCDREDGLARDVYEDIIAGLTSAHAPAMVYQIDTNMKQVAIERPNATEDGTARAGRRDRWAGELMI

SEQ ID NO: 40011 - DNA, 4725 bp, Muscodor strobelii
  misc_feature: SGI EST ID NO. CUFF.96919.0
  misc_feature: Variant of the nucleotide sequence at SEQ ID NO 40009
cgaaatgctgtagcccagtttgatatgattgaagtctcgcgaaatcatacataatttgtattcatcatgtctactgccgacactgcatcagtattttctcagtcgcgaacgttggttccgccaaaaccagtagtgcttcgcaggccgtctaaatatctcaaaaatccggtcacgccatacgataactacggaaagctttggcagcctccaccaagtgagtggatgttggatacttggaccgtaacatggtccactcagtccaattggcactctgccaaaaatgtacgcatctcgttctcgcctcaccattctatattgagcccgcactcgccgcctggctttgaaaaggccatcaaaatgaacagcaccctccgatatgaaagtaaagatggcataaaaacaatagatggcgttgaatggccagatccaatggtccctggagcatggcggtggcgtggtacaggctggaaagcaatcaaggctcgtcactggcaagttcttggttatggtgaggcactgccatggagtggctacgcccaagtgcgctggatggccgtctggtttcaagcaacgacaacaacaaacgaagcagttgagatttggtgcgatagagaggatggactcgccagggacgtttatgaagacattatcgcggggctaacgtccgcacatgcaccagcaatggtttatcagattgatacgaacatgaagcaagtcgctattgagaggccgaatgcaacagaagatggcactgcacgtgcgggacggagggacaggtgggcaggtgagcttatgatttgatgggtttaaaagcagaaatcaaagtataggtatataacatagaaagaaagagagattgatgtgagcgacaccgtgctcgaaaaccctagtccatatcgcatatgccactttggcactcaccgcatcatcattctgttcgtcactccgaaccagctcagggtgcagatagctatgcgtaatgatgaatggtcgctatcgacttatacgatcaataaaggagacattctatcctaggaatcatacttctgagtgcagcggttgatggggttatattacatgtagagaagcctgcctgattcctcgggtttctgacgcatgcgagacgacttctagcgaaaccaatattggcaggtctggtttcgcaagatttcgaatgcagaagcctaccatttgatcattccagaggaaaatggtaagttcattttaggatatagcacccgtgattatccatcaagcccctagaaaacccccttcggaatgccttagcattggcattcatctcacgaacacagccagtgtcaactctgcagcatgataagttcaggatccgctgggtatcgctgtattccatcacatgtactgagttgtgccacacgctcacacctatctacgcacacaagccaaaggactcatcactcaggaacttggaagaacaacagacatttaaaagcggcgaagacttcatattgaatgatctagctaccgtccaacctggcggtgcatagttacatgaagtagctaatgatctactctagatgaagcctatgccaaccctatacccctcgctcgcaggtttcttctttctcttcctcatcatcgtcatccacattgggtatcaaatgaaatacaaaagaagcttttcgtggaagaaatagatcaaagaaaacgctgagaatgatgttatatgtacatctaaatcaagaaaacgctggtgacaagaaagtctcgatgtcttctatacccttagacggcaatcctgttgtgtctgtaggttctagtctctgttcggctgttcggggccgagacgccattacggggcatccatccttggagcctctggccaagtccacatcgaacaatccgttcaagcttcacgcttgcgttcttaacattgtcgacgaggtcggtgtgaatccgattccaaaaggaatcagttgacttcgactcaatcgtagaggaggagggtaaatacaacgctgcctcgtaagacatgcgtgaaaacgtgtgcatttggggccaagcgacaccgagcgacacaatggccatcagcacgaacggactaataccaaacggcacaagcgctgcaagataaaagaatagcatagacatgctaaacatgactgagtcttcagccaggcgatcttgtggtgtcgagacgacgggttgtgtggctgcaatcccccttggatcgaacctaacaccctcgagtctgtcctggtgtgatacagcagaggcagtaaccacgtcactaccagttgcttggtcgactggttgcaccatttggtacgagcggagctgactggcactcgttgcggtcatgtgtcgatcaagatggtcttgtcgcgttacctgttggactggtgtgccagtgtcggtgcggtctggtgttgcagtacgtatgctctcccgttcgtacagtcgtgacacctcttcgctcgaacatccgtgtgctgcattggtactaaggccagcgctactgaatacaggaggctggcgttgtgagaatcgttctggctcggtagtgatcgcctcagtatgattggatgcgctcgtaaaactagtaaatgcatcaagtgtaccaatggtgtcaaaagaagctgttccaagttgcacgggtgccatagcattgtagtctgcagcggcggcgacggttgagcgagagctatagccagaactagagccagagcgacgttcgtctcttggtacggtcactccattggagaacaccgcgttgctatttattggctctgaagacatcgatgttgtgagtggcaccactccgcgtcggtaatcgtcatcatggctctgggcttcgaaggaattgacaccttcataggcaatggcattaacatgaacaccattcgaaggcgtgagtgtactagttgcaattgcaccgtcgctcatcacgcggctgattccctcaatgcttgatggctggtgctctaagttcgccacgtctcgatacccgccatgactggcgtcataggatgcagtatccagtaccgatgaagacgtagactggaggtgaagatgtgtcgcaatgtttacagaatctgccactgcattgtcgatattgcgcccgttacggtcgtcggcatattcgtcgctatcccggccatgtggtggtaactgctgtcgtacgcgtccagcgaggttggggcggggcgatgccgcgctaagctctctggccatgctgagttcttcgtccaagaatggcgatgaagcaggtgagaatagatcgaagtcgacataattgcttgtagactctagtccgctttcgctcaagtatggaagcattggcgcattcgactctccttccacgattgtcgttcctgggtggacctcaccagataggtcgtcaataggagtaggtggtagttgtgacggggaggcgttggaagaggtgaatgttgcggaggtaccggcgggtgagaagtatccagcagggtctgtgaagaagtcgtaatcaacaggaatgttgtctagtggctcatcgtcgaactggatgaattgatcccattccattacaccttcgcccacagaatcaaaaggtagactaggtgaagagccagatgatgagggtgactcgctcatcatattgagctccggtaccactgctggcttagatgcaggtactggtcgactgctcttgctggccttcttagtcacctttccagaggagccagtggctggtctcttgtggctgggatcacactttgtcttctttttccggcaagattcacaggccttgatgatgcgcatgagatgcgcatgatctctctgctccttcgtcttgcagcctcgtgatgacaagtttgtgacgtcgcgcccgtccttggtcattattctcattccaggtacattagaatagtctcggggagtggagacgttaggagatgagaatgatgttgtctgtgaggcgggagaggctgcaaagcttgagccatacccagagtccatggcaggagaaggggcgacagaggcaaaagcaggaaccatgaagaacttgaagaattcgccagtgaccatggtgttctggaagaactccatcgagaccgtagcccgcttctccataatgggagcatttccaggcacgtaggcattgatcaactcgtccagttctttcgagcctagagctgggaagaattgcaagggagcgccaagggcaggctgcgaaatggagaatcccatcagggaagtggccgagttgttgcgagacattgaagacataatttttttgttgctcgctgtaggaaacctggttggatacagtttggcagattgtgtcgaagtcgcttcacaatcgggcaacggggaactcgtttgccctgataagcgggggaggggtgtttggtgccgccaacttcagaagcggacacacagttgataccttgtcgtgaagctcgacagtaaggagataattagtgagaatgtattgtaactgtcgttccaataatctctgtacgttacggaagctgtgaactccgtcagctccttaatgccaagctctgagaaagaaaaatggtgatatggtgatatggtgattaggccgacacgtccaaaggggatagaccatggtggtcgattaggtacatgtacttactcgtaagtttgcagatagagtggaggtggtatcgatgatgatatttgccttcaccaaaatacgagatgggtgacagatctgaagatagttgaagaacggag

SEQ ID NO: 40012 - DNA, 2448 bp, Muscodor strobelii
  misc_feature: SGI cDNA ID NO. 573937
  misc_feature: Encodes the peptide sequence at SEQ ID NO 40013
atgggattctccatttcgcagcctgcccttggcgctcccttgcaattcttcccagctctaggctcgaaagaactggacgagttgatcaatgcctacgtgcctggaaatgctcccattatggagaagcgggctacggtctcgatggagttcttccagaacaccatggtcactggcgaattcttcaagttcttcatggttcctgcttttgcctctgtcgccccttctcctgccatggactctgggtatggctcaagctttgcagcctctcccgcctcacagacaacatcattctcatctcctaacgtctccactccccgagactattctaatgtacctggaatgagaataatgaccaaggacgggcgcgacgtcacaaacttgtcatcacgaggctgcaagacgaaggagcagagagatcatgcgcatctcatgcgcatcatcaaggcctgtgaatcttgccggaaaaagaagacaaagtgtgatcccagccacaagagaccagccactggctcctctggaaaggtgactaagaaggccagcaagagcagtcgaccagtacctgcatctaagccagcagtggtaccggagctcaatatgatgagcgagtcaccctcatcatctggctcttcacctagtctaccttttgattctgtgggcgaaggtgtaatggaatgggatcaattcatccagttcgacgatgagccactagacaacattcctgttgattacgacttcttcacagaccctgctggatacttctcacccgccggtacctccgcaacattcacctcttccaacgcctccccgtcacaactaccacctactcctattgacgacctatctggtgaggtccacccaggaacgacaatcgtggaaggagagtcgaatgcgccaatgcttccatacttgagcgaaagcggactagagtctacaagcaattatgtcgacttcgatctattctcacctgcttcatcgccattcttggacgaagaactcagcatggccagagagcttagcgcggcatcgccccgccccaacctcgctggacgcgtacgacagcagttaccaccacatggccgggatagcgacgaatatgccgacgaccgtaacgggcgcaatatcgacaatgcagtggcagattctgtaaacattgcgacacatcttcacctccagtctacgtcttcatcggtactggatactgcatcctatgacgccagtcatggcgggtatcgagacgtggcgaacttagagcaccagccatcaagcattgagggaatcagccgcgtgatgagcgacggtgcaattgcaactagtacactcacgccttcgaatggtgttcatgttaatgccattgcctatgaaggtgtcaattccttcgaagcccagagccatgatgacgattaccgacgcggagtggtgccactcacaacatcgatgtcttcagagccaataaatagcaacgcggtgttctccaatggagtgaccgtaccaagagacgaacgtcgctctggctctagttctggctatagctctcgctcaaccgtcgccgccgctgcagactacaatgctatggcacccgtgcaacttggaacagcttcttttgacaccattggtacacttgatgcatttactagttttacgagcgcatccaatcatactgaggcgatcactaccgagccagaacgattctcacaacgccagcctcctgtattcagtagcgctggccttagtaccaatgcagcacacggatgttcgagcgaagaggtgtcacgactgtacgaacgggagagcatacgtactgcaacaccagaccgcaccgacactggcacaccagtccaacaggtaacgcgacaagaccatcttgatcgacacatgaccgcaacgagtgccagtcagctccgctcgtaccaaatggtgcaaccagtcgaccaagcaactggtagtgacgtggttactgcctctgctgtatcacaccaggacagactcgagggtgttaggttcgatccaagggggattgcagccacacaacccgtcgtctcgacaccacaagatcgcctggctgaagactcagtcatgtttagcatgtctatgctattcttttatcttgcagcgcttgtgccgtttggtattagtccgttcgtgctgatggccattgtgtcgctcggtgtcgcttggccccaaatgcacacgttttcacgcatgtcttacgaggcagcgttgtatttaccctcctcctctacgattgagtcgaagtcaactgattccttttggaatcggattcacaccgacctcgtcgacaatgttaagaacgcaagcgtgaagcttgaacggattgttcgatgtggacttggccagaggctccaaggatggatgccccgtaatggcgtctcggccccgaacagccgaacagagactagaacctacagacacaacaggattgccgtctaa

SEQ ID NO: 40013 - protein, 815 aa, Muscodor strobelii
  misc_feature: SGI Peptide ID NO. 573937
  misc_feature (2)..(345): NCBI GI: 256733778 Blast Desc: NECHADRAFT_99793 [Nectria haematococca mpVI 77-13-4]
  misc_feature (2)..(332): NCBI GI: 46140191 Blast Desc: FG11610.1 [Gibberella zeae PH-1]
  misc_feature (2)..(331): NCBI GI: 171676243 Blast Desc: protein product [Podospora anserina] gi|170936187|emb|CAP60847.1| protein product [Podospora anserina]
  misc_feature (8)..(331): NCBI GI: 261353389 Blast Desc: conserved [Verticillium albo-atrum VaMs.102]
  misc_feature (2)..(338): NCBI GI: 116193883 Blast Desc: CHGG_06659 [Chaetomium globosum CBS 148.51] gi|88182572|gb|EAQ90040.1| CHGG_06659 [Chaetomium globosum CBS 148.51]
  misc_feature (2)..(332): NCBI GI: 85118824 Blast Desc: NCU01886 [Neurospora crassa OR74A] gi|28927327|gb|EAA36281.1| [Neurospora crassa OR74A]
  misc_feature (2)..(345): NCBI GI: 149210387 Blast Desc: MGCH7_ch7g671 [Magnaporthe grisea 70-15] gi|86196626|gb|EAQ71264.1| MGCH7_ch7g671 [Magnaporthe grisea 70-15]
  misc_feature (2)..(345): NCBI GI: 145609884 Blast Desc: MGG_02906 [Magnaporthe grisea 70-15] gi|145017269|gb|EDK01632.1| MGG_02906 [Magnaporthe grisea 70-15]
  misc_feature (3)..(166): NCBI GI: 156058870 Blast Desc: SS1G_03447 [Sclerotinia sclerotiorum 1980] gi|154701234|gb|EDO00973.1| SS1G_03447 [Sclerotinia sclerotiorum 1980]
MGFSISQPALGAPLQFFPALGSKELDELINAYVPGNAPIMEKRATVSMEFFQNTMVTGEFFKFFMVPAFASVAPSPAMDSGYGSSFAASPASQTTSFSSPNVSTPRDYSNVPGMRIMTKDGRDVTNLSSRGCKTKEQRDHAHLMRIIKACESCRKKKTKCDPSHKRPATGSSGKVTKKASKSSRPVPASKPAVVPELNMMSESPSSSGSSPSLPFDSVGEGVMEWDQFIQFDDEPLDNIPVDYDFFTDPAGYFSPAGTSATFTSSNASPSQLPPTPIDDLSGEVHPGTTIVEGESNAPMLPYLSESGLESTSNYVDFDLFSPASSPFLDEELSMARELSAASPRPNLAGRVRQQLPPHGRDSDEYADDRNGRNIDNAVADSVNIATHLHLQSTSSSVLDTASYDASHGGYRDVANLEHQPSSIEGISRVMSDGAIATSTLTPSNGVHVNAIAYEGVNSFEAQSHDDDYRRGVVPLTTSMSSEPINSNAVFSNGVTVPRDERRSGSSSGYSSRSTVAAAADYNAMAPVQLGTASFDTIGTLDAFTSFTSASNHTEAITTEPERFSQRQPPVFSSAGLSTNAAHGCSSEEVSRLYERESIRTATPDRTDTGTPVQQVTRQDHLDRHMTATSASQLRSYQMVQPVDQATGSDVVTASAVSHQDRLEGVRFDPRGIAATQPVVSTPQDRLAEDSVMFSMSMLFFYLAALVPFGISPFVLMAIVSLGVAWPQMHTFSRMSYEAALYLPSSSTIESKSTDSFWNRIHTDLVDNVKNASVKLERIVRCGLGQRLQGWMPRNGVSAPNSRTETRTYRHNRIAV

SEQ ID NO: 40014 - DNA, 4597 bp, Muscodor strobelii
  misc_feature: SGI EST ID NO. CUFF.96920.1
  misc_feature: Variant of the nucleotide sequence at SEQ ID NO 40012
ctccgttcttcaactatcttcagatctgtcacccatctcgtattttggtgaaggcaaatatcatcatcgataccacctccactctatctgcaaacttacgacttccgtaacgtacagagattattggaacgacagttacaatacattctcactaattatctccttactgtcgagcttcacgacaaggtatcaactgtgtgtccgcttctgaagttggcggcaccaaacacccctcccccgcttatcagggcaaacgagttccccgttgcccgattgtgaagcgacttcgacacaatctgccaaactgtatccaaccaggtttcctacagcgagcaacaaaaaaattatgtcttcaatgtctcgcaacaactcggccacttccctgatgggattctccatttcgcagcctgcccttggcgctcccttgcaattcttcccagctctaggctcgaaagaactggacgagttgatcaatgcctacgtgcctggaaatgctcccattatggagaagcgggctacggtctcgatggagttcttccagaacaccatggtcactggcgaattcttcaagttcttcatggttcctgcttttgcctctgtcgccccttctcctgccatggactctgggtatggctcaagctttgcagcctctcccgcctcacagacaacatcattctcatctcctaacgtctccactccccgagactattctaatgtacctggaatgagaataatgaccaaggacgggcgcgacgtcacaaacttgtcatcacgaggctgcaagacgaaggagcagagagatcatgcgcatctcatgcgcatcatcaaggcctgtgaatcttgccggaaaaagaagacaaagtgtgatcccagccacaagagaccagccactggctcctctggaaaggtgactaagaaggccagcaagagcagtcgaccagtacctgcatctaagccagcagtggtaccggagctcaatatgatgagcgagtcaccctcatcatctggctcttcacctagtctaccttttgattctgtgggcgaaggtgtaatggaatgggatcaattcatccagttcgacgatgagccactagacaacattcctgttgattacgacttcttcacagaccctgctggatacttctcacccgccggtacctccgcaacattcacctcttccaacgcctccccgtcacaactaccacctactcctattgacgacctatctggtgaggtccacccaggaacgacaatcgtggaaggagagtcgaatgcgccaatgcttccatacttgagcgaaagcggactagagtctacaagcaattatgtcgacttcgatctattctcacctgcttcatcgccattcttggacgaagaactcagcatggccagagagcttagcgcggcatcgccccgccccaacctcgctggacgcgtacgacagcagttaccaccacatggccgggatagcgacgaatatgccgacgaccgtaacgggcgcaatatcgacaatgcagtggcagattctgtaaacattgcgacacatcttcacctccagtctacgtcttcatcggtactggatactgcatcctatgacgccagtcatggcgggtatcgagacgtggcgaacttagagcaccagccatcaagcattgagggaatcagccgcgtgatgagcgacggtgcaattgcaactagtacactcacgccttcgaatggtgttcatgttaatgccattgcctatgaaggtgtcaattccttcgaagcccagagccatgatgacgattaccgacgcggagtggtgccactcacaacatcgatgtcttcagagccaataaatagcaacgcggtgttctccaatggagtgaccgtaccaagagacgaacgtcgctctggctctagttctggctatagctctcgctcaaccgtcgccgccgctgcagactacaatgctatggcacccgtgcaacttggaacagcttcttttgacaccattggtacacttgatgcatttactagttttacgagcgcatccaatcatactgaggcgatcactaccgagccagaacgattctcacaacgccagcctcctgtattcagtagcgctggccttagtaccaatgcagcacacggatgttcgagcgaagaggtgtcacgactgtacgaacgggagagcatacgtactgcaacaccagaccgcaccgacactggcacaccagtccaacaggtaacgcgacaagaccatcttgatcgacacatgaccgcaacgagtgccagtcagctccgctcgtaccaaatggtgcaaccagtcgaccaagcaactggtagtgacgtggttactgcctctgctgtatcacaccaggacagactcgagggtgttaggttcgatccaagggggattgcagccacacaacccgtcgtctcgacaccacaagatcgcctggctgaagactcagtcatgtttagcatgtctatgctattcttttatcttgcagcgcttgtgccgtttggtattagtccgttcgtgctgatggccattgtgtcgctcggtgtcgcttggccccaaatgcacacgttttcacgcatgtcttacgaggcagcgttgtatttaccctcctcctctacgattgagtcgaagtcaactgattccttttggaatcggattcacaccgacctcgtcgacaatgttaagaacgcaagcgtgaagcttgaacggattgttcgatgtggacttggccagaggctccaaggatggatgccccgtaatggcgtctcggccccgaacagccgaacagagactagaacctacagacacaacaggattgccgtctaagggtatagaagacatcgagactttcttgtcaccagcgttttcttgatttagatgtacatataacatcattctcagcgttttctttgatctatttcttccacgaaaagcttcttttgtatttcatttgatacccaatgtggatgacgatgatgaggaagagaaagaagaaacctgcgagcgaggggtatagggttggcataggcttcatctagagtagatcattagctacttcatgtaactatgcaccgccaggttggacggtagctagatcattcaatatgaagtcttcgccgcttttaaatgtctgttgttcttccaagttcctgagtgatgagtcctttggcttgtgtgcgtagataggtgtgagcgtgtggcacaactcagtacatgtgatggaatacagcgatacccagcggatcctgaacttatcatgctgcagagttgacactggctgtgttcgtgagatgaatgccaatgctaaggcattccgaagggggttttctaggggcttgatggataatcacgggtgctatatcctaaaatgaacttaccattttcctctggaatgatcaaatggtaggcttctgcattcgaaatcttgcgaaaccagacctgccaatattggtttcgctagaagtcgtctcgcatgcgtcagaaacccgaggaatcaggcaggcttctctacatgtaatataaccccatcaaccgctgcactcagaagtatgattcctaggatagaatgtctcctttattgatcgtataagtcgatagcgaccattcatcattacgcatagctatctgcaccctgagctggttcggagtgacgaacagaatgatgatgcggtgagtgccaaagtggcatatgcgatatggactagggttttcgagcacggtgtcgctcacatcaatctctctttctttctatgttatatacctatactttgatttctgcttttaaacccatcaaatcataagctcacctgcccacctgtccctccgtcccgcacgtgcagtgccatcttctgttgcattcggcctctcaatagcgacttgcttcatgttcgtatcaatctgataaaccattgctggtgcatgtgcggacgttagccccgcgataatgtcttcataaacgtccctggcgagtccatcctctctatcgcaccaaatctcaactgcttcgtttgttgttgtcgttgcttgaaaccagacggccatccagcgcacttgggcgtagccactccatggcagtgcctcaccataaccaagaacttgccagtgacgagccttgattgctttccagcctgtaccacgccaccgccatgctccagggaccattggatctggccattcaacgccatctattgtttttatgccatctttactttcatatcggagggtgctgttcattttgatggccttttcaaagccaggcggcgagtgcgggctcaatatagaatggtgaggcgagaacgagatgcgtacatttttggcagagtgccaattggactgagtggaccatgttacggtccaagtatccaacatccactcacttggtggaggctgccaaagctttccgtagttatcgtatggcgtgaccggatttttgagatatttagacggcctgcgaagcactactggttttggcggaaccaacgttcgcgactgagaaaatactgatgcagtgtcggcagtagacatgatgaatacaaattatgtatgatttcgcgagacttcaatcatatcaaactgggctacagcatttcg

SEQ ID NO: 40015 - DNA, 1347 bp, Muscodor strobelii
  misc_feature: SGI cDNA ID NO. 573938
  misc_feature: Encodes the peptide sequence at SEQ ID NO 40016
atgtcgtctcctggctatctggctccgccgccccggcagtctcaacacggacctggcgagatcatactgatcgaacctacagctccgcaccagcacttttataaccaagcgcgacgagaagcagatagatgccggcttgaaattcatgttgctcaacagaacaacctcgccatccccccaagagccgaagctgctattgcccggagtcctacaagtgatagtcaccccagcccaagcaccggaccttcacatgctgccgacagcgattcgcctttttctccggttgcagcaccagaatcgacaaaatcaaaaccaagccgtggccgtagaaaaggcccacttgatctcgagacacgagcgaagactgcattcaagcggaaattcaagctcacctgcgaatttcaccgggcaaaacggacatcgtgcaaatgctttgatttttcaaggctagaagaaggttatcagaacctgatcaagagtgaaacgtcacagagaaagagaacccgaagtcggtcagcaagtcaaaatgaatattctagagagtcgcttagggacatggagacggccagcaccggtggtgtagccctgagcaccccctcatatccagatctcgactcgaccgacctattgatccccccatattcacccgcccaagttcgagaaagtgtccagccgatattgagatttgatatcaattcgcaagactcgctcaacgaaatgatgtcaacctccgttgttcagccttatcttccacctccatcacctacgcctggtcaaccagaacttcacccgctaccgattggtcgtcagatgtcgtaccgcaaccgatgggcatgcgagtttgactatggagaggaaaccagctcactggcttcaggcccaggatgggacacagctccagcctgcattgtcgctagtcgttgcgctcaaacatcctgggagaaatggtactatggtgccacaacgcgtaaagcgagcggtggccttgaagctaagacagtatcggaattatccgacaatgatgttttgaaccgagagctgctttggggaacgcccagatcaagcaataccgagccttcgaattttccaaacagttacgcttcatcaagtgtatcaggcgccttcaacgaatctcatcggcgtaacacaagtcccaatgagactagcgagcaacattgtgatattgacttgaaccagagcttcacaaaggctagcatatcttgcgagggctatgaggatagatttctcgctactcacacatttcatataaagcagtatctacttctcttcattgcactcgaagaaatagggattttaaaggggcgacgcctcgaagctgatacctag

SEQ ID NO: 40016 - protein, 448 aa, Muscodor strobelii
  misc_feature: SGI Peptide ID NO. 573938
MSSPGYLAPPPRQSQHGPGEIILIEPTAPHQHFYNQARREADRCRLEIHVAQQNNLAIPPRAEAAIARSPTSDSHPSPSTGPSHAADSDSPFSPVAAPESTKSKPSRGRRKGPLDLETRAKTAFKRKFKLTCEFHRAKRTSCKCFDFSRLEEGYQNLIKSETSQRKRTRSRSASQNEYSRESLRDMETASTGGVALSTPSYPDLDSTDLLIPPYSPAQVRESVQPILRFDINSQDSLNEMMSTSVVQPYLPPPSPTPGQPELHPLPIGRQMSYRNRWACEFDYGEETSSLASGPGWDTAPACIVASRCAQTSWEKWYYGATTRKASGGLEAKTVSELSDNDVLNRELLWGTPRSSNTEPSNFPNSYASSSVSGAFNESHRRNTSPNETSEQHCDIDLNQSFTKASISCEGYEDRFLATHTFHIKQYLLLFIALEEIGILKGRRLEADT

SEQ ID NO: 40017 - DNA, 2634 bp, Muscodor strobelii
  misc_feature: SGI EST ID NO. CUFF.96674.0
  misc_feature: Variant of the nucleotide sequence at SEQ ID NO 40015
tttcgccccatttcggtctcattgtgtgatttctctcctcgttctaagctgctaatagtgcctctttggctagttgttcacctataacttgttgcgtctgagccattgagagtcgcatgtccctgtcccacttatcgtgtctgttttgagcctcaactcggttgcctgggtgggcaaggctgcgtcgtgaaactcatcttcttagccgtagttcctagcttctggaagaacttggaacatctctctccgagactcctccatcacttttatactatgtcgtctcctggctatctggctccgccgccccggcagtctcaacacggacctggcgagatcatactgatcgaacctacagctccgcaccagcacttttataaccaagcgcgacgagaagcagatagatgccggcttgaaattcatgttgctcaacagaacaacctcgccatccccccaagagccgaagctgctattgcccggagtcctacaagtgatagtcaccccagcccaagcaccggaccttcacatgctgccgacagcgattcgcctttttctccggttgcagcaccagaatcgacaaaatcaaaaccaagccgtggccgtagaaaaggcccacttgatctcgagacacgagcgaagactgcattcaagcggaaattcaagctcacctgcgaatttcaccgggcaaaacggacatcgtgcaaatgctttgatttttcaaggctagaagaaggttatcagaacctgatcaagagtgaaacgtcacagagaaagagaacccgaagtcggtcagcaagtcaaaatgaatattctagagagtcgcttagggacatggagacggccagcaccggtggtgtagccctgagcaccccctcatatccagatctcgactcgaccgacctattgatccccccatattcacccgcccaagttcgagaaagtgtccagccgatattgagatttgatatcaattcgcaagactcgctcaacgaaatgatgtcaacctccgttgttcagccttatcttccacctccatcacctacgcctggtcaaccagaacttcacccgctaccgattggtcgtcagatgtcgtaccgcaaccgatgggcatgcgagtttgactatggagaggaaaccagctcactggcttcaggtgaatcatgtccatggacagggcctttcgagcagctttgttttcacttccgcggggcacatcattcatttgaacccatggatgagccttgttggtcgttgtgcgctcaatgcggcacgataggcccaggatgggacacagctccagcctgcattgtcgctagtcgttgcgctcaaacatcctgggagaaatggtactatggtgccacaacgcgtaaagcgagcggtggccttgaagctaagacagtatcggaattatccgacaatgatgttttgaaccgagagctgctttggggaacgcccagatcaagcaataccgagccttcgaattttccaaacagttacgcttcatcaagtgtatcaggcgccttcaacgaatctcatcggcgtaacacaagtcccaatgagactagcgagcaacattgtgatattgacttgaaccagagcttcacaaaggctagcatatcttgcgagggctatgaggataggttcataagaccttgtacccctgcaagctggacaccagcctgcaatgcatggtctagactaacgttctgtcagttgctcatgaccgccacttggttcccacagtcgctttgttacctacttgctgcgatgtgttttatctgtcttttagacgccgaaaggcggcatgattattcaatcgatcttgtcagatttctcgctactcacacatttcatataaagcagtatctacttctcttcattgcagtatgtggcttggtactatgcttgactaagagtataatgatgttgaagagactagctcgaagagtgagtttgaaaacgactttcccagtgtatacacatagactgactctctctagaatagggattttaaaggggcgacgcctcgaagctgatacctagtgcatcgtggaaccagcctgattttgttagatgattctgctcctagcgagttgtacatagcccgaatacttctttgctttttgtagctgagtgctagcggaggctttacggcgttggcaatgattggtaataaggatatgaacaccatatctctagcccgaggtgaaattgttggactatgagggagcgaaagttacgactaggtcgcactttcaaagatgaaggaaaggatgatgataactatagcatgcggctatatttcatatctgcggcgttggagttaatgagttggtagttgattgaatgaatgatggtgatacacatggcttacctgcgtctgtgagatgagatagtaaggtacaaattgttatggaagccagtaccggctgcctcatacttatcaattggcacaggagttcgctttgcgatgaagtgttgcggtgggtcaagatttgcaatcgcgtatctcatggtgattgaaggtacataggcgtagtgaggttaacctacctgagcccgcctggattcagctgtagcccacaaaaggccgtgcccgcccccgttggttcatgcactgccccgatttgttgcaga

SEQ ID NO: 40018 - DNA, 2502 bp, Muscodor strobelii
  misc_feature: SGI cDNA ID NO. 573939
  misc_feature: Encodes the peptide sequence at SEQ ID NO 40019
atggccacggcagtgcaaactgcccgaagctcaaacttgggcccacagactccggccacaactgctgcggtccgtgaacatgcatgtctgttcactcatgatctgcgccggaaacagaagcgttggcaggatggcaggctcaaacaccatactttcaacgggaaagttatggtgtatgacgagcgaggcaactttatcggtgaaacgcattggcaggaggactatcctatggatgatggcgaagaacttgagcttgagcgaggaggcgttattgtgcaggttgccgaatgtctcgccagtcgcgaacaagacctttctgagctcatagacaagagggcgcaagagaaagcggcacgacaggctgcggcagcagcgcgacgacccctaatcgcccaaccgtcatctttcaacccaccaacaccgcagcgtccacctcagaagcatcttcacagtgtaattggaacgccatctggtcatcatggtcgcgcaactattccgaagcacagtccttacgagcagagacagcaaagtgaagacacccgaccaaccaagcgactgaagagggcagtgtctcctccaagcaagcatgggtacgctcaaaatttgtttggtgcagctctgacactatcaggacggcctctcagccagacatctgtgcgccatcatccctcgcaaggagcgcgtctgcaggaagatgttatgtcatcacagttatccgaccagaacaaggactgcaatacttctgttagcacaacaaacaaatcaaatccacaagccaacgccacgttctctcaacaccgtgcactgtcgaataataatgcccatagagatgctatatcacggagacctctgttggccattgcagaaattcagactttgcaacaaccaacacaaccagtgcctcggaactgcatgaggctacctgtaaaggactcgatctcacatgatcagaaccccaaattggctcctcgcgccgataagcagaatggacaggcggatgcttcaattatgcaaatacttcctgtaaatcatagtcttcgtggccctaaaagacctgataagtccaccgataagcgaagacaaaatcctgagatcgaggggccagctccgagtacaagaaactcaaagcagatttctagtaacaagaaggtggactctggcactggtcgagcgaaaggtgtagtttcacaaagttcaatgaatccaaagtcactaaattcgagaaagatagtcgatctgaccgaagacttgccgaatgaattgttggaggaaccaagcatcgacgaacccagaacagaattacgaatcaaaacgagaaagaagcccggcctcgtgatggtttccgagcaaatcgctccgcggaagtcgtcttcttcaaattcaaagaaaatcaaagatcgggaacaccactcatctctatttctggacgagaacgcatgcaacatctcaaagggtgccaagctgcgacaacagagctcttcagaaattgaaattactcgaagcagtgcatctgaaagctctgtgcacaatgcggtgcaacgaaaccccaccgggagacaggctgacgttggcaatacgaaccagtccaaagctacaccgcatctggatagagtcgatgcgcacgctgacttggaatgccaagatgaacgcagcatgacacggactaaaatgtcagcgaaatcaattaacgtcgtaaagcaggctcaggccgatacgaccgaggcagacattaccgacagaccagcaaggcacaaaaagcaaacattatcttctcaagaggatctgcaactcggcagtgacacccaggtccgtaaacaaccagccgcggctccaaaggaagtcaacgagcttgcgcaggataaccccgcccctcgattagcaaagctgggtcgcaaaagtattaagagcagggaagtaattggcttgacatttgatgatgaaccggatatacctcgttctggtgaaggtaatgtgaccgcatcctcgaacgagcggccaccatcaccaaaacaccgtgaacgttctccgatccagtcatcaacagcggcagttgctggaaaagctcgccacgagttcgcgcctcagtccgaagaacagtgcgtcaatccttcatttgcccagcttaaagcggggccacgtacgctgagacgccaagagagcaaatcctcgaataccgcagatgccactgaaagtcctgtgaatctagagcaagtgtcaaatgccgtcacggtcgtggagaagccaacgactgtcctcgtgaatcctgcgacacgagggaagaaagcagccaggccctcggacatggctggccaagtgcccgtatgtcctctgccgccagaaccagcgggaaccatgtcaatgcgcactggacctaagagatcaaccgtgactagtatctctgacaagggaatggcgggttcaatgccgggtttctcaagagcaaatggaggaccgtggagtagggaggcacatgatctgttcgatttcaaacggccatcgtag

SEQ ID NO: 40019 - protein, 833 aa, Muscodor strobelii
  misc_feature: SGI Peptide ID NO. 573939
  misc_feature (1)..(220): NCBI GI: 85118817 Blast Desc: NCU01884 [Neurospora crassa OR74A] gi|28927325|gb|EAA36279.1| NCU01884 [Neurospora crassa OR74A] gi|38636448|emb|CAE81984.1| [Neurospora crassa]
  misc_feature (19)..(240): NCBI GI: 171676239 Blast Desc: protein product [Podospora anserina] gi|170936185|emb|CAP60845.1| protein product [Podospora anserina]
  misc_feature (19)..(227): NCBI GI: 261353390 Blast Desc: conserved [Verticillium albo-atrum VaMs.102]
  misc_feature (21)..(221): NCBI GI: 154308309 Blast Desc: BC1G_07900 [Botryotinia fuckeliana B05.10] gi|150852985|gb|EDN28177.1| BC1G_07900 [Botryotinia fuckeliana B05.10]
  misc_feature (19)..(215): NCBI GI: 39970867 Blast Desc: MGG_02900 [Magnaporthe grisea 70-15] gi|149210373|ref|XP_001522561.1| MGCH7_ch7g664 [Magnaporthe grisea 70-15] gi|86196619|gb|EAQ71257.1| MGCH7_ch7g664 grisea
  misc_feature (21)..(210): NCBI GI: 156058902 Blast Desc: SS1G_03463 [Sclerotinia sclerotiorum 1980] gi|154701250|gb|EDO00989.1| SS1G_03463 [Sclerotinia sclerotiorum 1980]
  misc_feature (20)..(210): NCBI GI: 256733777 Blast Desc: NECHADRAFT_78236 [Nectria haematococca mpVI 77-13-4]
  misc_feature (57)..(242): NCBI GI: 116193877 Blast Desc: CHGG_06656 [Chaetomium globosum CBS 148.51] gi|88182569|gb|EAQ90037.1| CHGG_06656 [Chaetomium globosum CBS 148.51]
  misc_feature (11)..(187): NCBI GI: 212530696 Blast Desc: conserved [Penicillium marneffei ATCC 18224] gi|210074903|gb|EEA28990.1| conserved [Penicillium marneffei ATCC 18224]
  misc_feature (21)..(187): NCBI GI: 242817863 Blast Desc: conserved [Talaromyces stipitatus ATCC 10500] gi|218713493|gb|EED12917.1| conserved [Talaromyces stipitatus ATCC 10500]
MATAVQTARSSNLGPQTPATTAAVREHACLFTHDLRRKQKRWQDGRLKHHTFNGKVMVYDERGNFIGETHWQEDYPMDDGEELELERGGVIVQVAECLASREQDLSELIDKRAQEKAARQAAAAARRPLIAQPSSFNPPTPQRPPQKHLHSVIGTPSGHHGRATIPKHSPYEQRQQSEDTRPTKRLKRAVSPPSKHGYAQNLFGAALTLSGRPLSQTSVRHHPSQGARLQEDVMSSQLSDQNKDCNTSVSTTNKSNPQANATFSQHRALSNNNAHRDAISRRPLLAIAEIQTLQQPTQPVPRNCMRLPVKDSISHDQNPKLAPRADKQNGQADASIMQILPVNHSLRGPKRPDKSTDKRRQNPEIEGPAPSTRNSKQISSNKKVDSGTGRAKGVVSQSSMNPKSLNSRKIVDLTEDLPNELLEEPSIDEPRTELRIKTRKKPGLVMVSEQIAPRKSSSSNSKKIKDREHHSSLFLDENACNISKGAKLRQQSSSEIEITRSSASESSVHNAVQRNPTGRQADVGNTNQSKATPHLDRVDAHADLECQDERSMTRTKMSAKSINVVKQAQADTTEADITDRPARHKKQTLSSQEDLQLGSDTQVRKQPAAAPKEVNELAQDNPAPRLAKLGRKSIKSREVIGLTFDDEPDIPRSGEGNVTASSNERPPSPKHRERSPIQSSTAAVAGKARHEFAPQSEEQCVNPSFAQLKAGPRTLRRQESKSSNTADATESPVNLEQVSNAVTVVEKPTTVLVNPATRGKKAARPSDMAGQVPVCPLPPEPAGTMSMRTGPKRSTVTSISDKGMAGSMPGFSRANGGPWSREAHDLFDFKRPS

SEQ ID NO: 40020 - DNA, 3398 bp, Muscodor strobelii
  misc_feature: SGI EST ID NO. CUFF.96660.0
  misc_feature: Variant of the nucleotide sequence at SEQ ID NO 40018
caaacactttacgcaccatgtagcctatgaccctcggtgcgtgaatatggcatcgaagtattcgcacttaagacgtagtagagctacgtcttcgactgatgtgatcttgacgtatcaaacaaatcatcgtcatcatggccacggcagtgcaaactgcccgaagctcaaacttgggcccacagactccggccacaactgctgcggtccgtgaacatgcatgtctgttcactcatgatctgcgccggaaacagaagcgttggcaggatggcaggctcaaacaccatactttcaacgggaaagttatggtgtatgacgagcgaggcaactttatcggtgaaacgcattggcaggaggactatcctatggatgatggcgaagaacttgagcttgagcgaggaggcgttattgtgcaggttgccgaatgtctcgccagtcgcgaacaagacctttctgagctcatagacaagagggcgcaagagaaagcggcacgacaggctgcggcagcagcgcgacgacccctaatcgcccaaccgtcatctttcaacccaccaacaccgcagcgtccacctcagaagcatcttcacagtgtaattggaacgccatctggtcatcatggtcgcgcaactattccgaagcacagtccttacgagcagagacagcaaagtgaagacacccgaccaaccaagcgactgaagagggcagtgtctcctccaagcaagcatgggtacgctcaaaatttgtttggtgcagctctgacactatcaggacggcctctcagccagacatctgtgcgccatcatccctcgcaaggagcgcgtctgcaggaagatgttatgtcatcacagttatccgaccagaacaaggactgcaatacttctgttagcacaacaaacaaatcaaatccacaagccaacgccacgttctctcaacaccgtgcactgtcgaataataatgcccatagagatgctatatcacggagacctctgttggccattgcagaaattcagactttgcaacaaccaacacaaccagtgcctcggaactgcatgaggctacctgtaaaggactcgatctcacatgatcagaaccccaaattggctcctcgcgccgataagcagaatggacaggcggatgcttcaattatgcaaatacttcctgtaaatcatagtcttcgtggccctaaaagacctgataagtccaccgataagcgaagacaaaatcctgagatcgaggggccagctccgagtacaagaaactcaaagcagatttctagtaacaagaaggtggactctggcactggtcgagcgaaaggtgtagtttcacaaagttcaatgaatccaaagtcactaaattcgagaaagatagtcgatctgaccgaagacttgccgaatgaattgttggaggaaccaagcatcgacgaacccagaacagaattacgaatcaaaacgagaaagaagcccggcctcgtgatggtttccgagcaaatcgctccgcggaagtcgtcttcttcaaattcaaagaaaatcaaagatcgggaacaccactcatctctatttctggacgagaacgcatgcaacatctcaaagggtgccaagctgcgacaacagagctcttcagaaattgaaattactcgaagcagtgcatctgaaagctctgtgcacaatgcggtgcaacgaaaccccaccgggagacaggctgacgttggcaatacgaaccagtccaaagctacaccgcatctggatagagtcgatgcgcacgctgacttggaatgccaagatgaacgcagcatgacacggactaaaatgtcagcgaaatcaattaacgtcgtaaagcaggctcaggccgatacgaccgaggcagacattaccgacagaccagcaaggcacaaaaagcaaacattatcttctcaagaggatctgcaactcggcagtgacacccaggtccgtaaacaaccagccgcggctccaaaggaagtcaacgagcttgcgcaggataaccccgcccctcgattagcaaagctgggtcgcaaaagtattaagagcagggaagtaattggcttgacatttgatgatgaaccggatatacctcgttctggtgaaggtaatgtgaccgcatcctcgaacgagcggccaccatcaccaaaacaccgtgaacgttctccgatccagtcatcaacagcggcagttgctggaaaagctcgccacgagttcgcgcctcagtccgaagaacagtgcgtcaatccttcatttgcccagcttaaagcggggccacgtacgctgagacgccaagagagcaaatcctcgaataccgcagatgccactgaaagtcctgtgaatctagagcaagtgtcaaatgccgtcacggtcgtggagaagccaacgactgtcctcgtgaatcctgcgacacgagggaagaaagcagccaggccctcggacatggctggccaagtgcccgtatgtcctctgccgccagaaccagcgggaaccatgtcaatgcgcactggacctaagagatcaaccgtgactagtatctctgacaagggaatggcgggttcaatgccgggtttctcaagagcaaatggaggaccgtggagtagggaggcacatgatctgttcgatttcaaacggccatcgtaggactatgcggtagagaaacacacggcctcctcgaagccgagcagtacgaaagggactcaaaaatctcggatctaagctcggtgctcaacacgactggttggaagccagtgccaaaagctctcgagcagaggtaaagcttggcctatcatgacgttatcagtatactccgactcaaacgcacaccacaaattctacattaattgcgtgtgctatcgtgtactgttagtagtatgaggatcactcgtaggcaaaaagaagcgaaacaattctgtcaggtaacgtaacacgcaatgagaagatgtacgcgtgtgcacagctgcagccgaaactcttcgtagaaatatgtacgtatctactccccatggctcaccgctccaacttggagttgggggccaaaagacccgtgctcgcgtcgggcgcggttggcaccgacccacacgagccatggtgttccgcgacctacgaaccttcggtcgtcgcctcaattcttgttactcactcagtacttcagcaaatttaccacgcaaatatgagcactcaagcagaggcccacaggcttcttccagagccactgtcaacgtacggtattatgctaaccctcgagatcgtccggttcgtcgttccagtactacgttggttgccggctcccccgaacaccattgtttcgcacttttgttgaagcagcttccccgctttcttgacgttccttttgcttcatgcttgcgatgctctttcgacaagagtgcaatagaaacacaaaac

SEQ ID NO: 40021 - DNA, 1470 bp, Muscodor strobelii
  misc_feature: SGI cDNA ID NO. 573940
  misc_feature: Encodes the peptide sequence at SEQ ID NO 40022
atgcagtcaatgcagaggcaattcgatcgcatgcttcgcaaggctcctggcgacaacgcgaaggtggctgtgatcctcagtgactatgaagacgctgacagagtccttgctaagatcatcgacgcagcaaagtcatggcgtgatgcgtgggttaacattgcctcaactcaacttggagtaattactgagttcgatggtctttgggatcctatcgtcggcgcatctgacgggctcggcaagccaccagctccaacaccagagcttcaactcgcgcaagccctgcagctgaaagaagcttatgcagaactcaagacagagcttttagaggaattgggcctcatagaagcacgtgtggtgaggcctgcgactgacgctcgtgactacatttcccctctacgaaagactatcaaaaagagagagaataagagactagactatgagaaagttcaagataaggccacgaaattgcagagaaagcctggtaaaacgccaaaagaagatgcagctcttcaaaaactagatgtcgaagttgcccgcactgctgaggaattccacattgcagatgcacatatcaggcaaacactgccaccagttgtggcggcaacgttcagtctcataccgtcactagtcgactccgtgttgctgatacaaaaccgacttcttggtctctattatacatctttgcacgcctactgtcaagagcatggttttccctcgcctccgccgcctatggaagatgtcattgccctatggtctgcaggatatgagccagtgaaacgagaagttgaattgatcacatgcattgccacaggcaaagccgtgcgcttgccaatgaaacttcctgacgatccaagcctacaagatcgccgcacatccgacacatcaacatctagtctggcaaaccctccacgccgtaccacttccggcctaattccaagcaagcccgcaattgggccgcggcccaatcgcataccctcgtcgacctcattggcgtcacaacaaagtccagtgcttgagcagcgaccatcagcgggaaacaattacataacatctaaccttactcccacagacttcaccacggcgtcaaggctgggacaaggacagccgattacaccgtctaccctttcgcccaactcgttgcgtcctaggaccgactacttcggccgccctccatcgacagtctctaatgctgggtcaacaacctccgtcaacacggcttcaagttttgtatctgctgctgcagcaaaaaagaagccgccgccaccccctccgcctaagaagattgcatcgagtcgtctagaggaatatgttgtagcgcaatatccattcaaaggcgaaggcgatggtgatctctccttccgcgagggtgacagaattaagatcgtcaagaaaaccaacacgctagatgattggtgggtaggagagcttggaggcatcaggggatcttttcctgcgaactactgcaaatag

SEQ ID NO: 40022 - protein, 489 aa, Muscodor strobelii
  misc_feature: SGI Peptide ID NO. 573940
  misc_feature (435)..(489): Pfam Id: PF00018 Pfam Desc: SH3 domain
  misc_feature (436)..(488): Pfam Id: PF07653 Pfam Desc: Variant SH3 domain
  misc_feature (435)..(487): Pfam Id: PF00018 Pfam Desc: SH3 domain
  misc_feature (436)..(489): Pfam Id: PF07653 Pfam Desc: Variant SH3 domain
  misc_feature (1)..(489): NCBI GI: 261353391 Blast Desc: SH3 domain signalling protein [Verticillium albo-atrum VaMs.102]
  misc_feature (1)..(489): NCBI GI: 171676237 Blast Desc: protein product [Podospora anserina] gi|170936184|emb|CAP60844.1| protein product [Podospora anserina]
  misc_feature (1)..(489): NCBI GI: 116193875 Blast Desc: CHGG_06655 [Chaetomium globosum CBS 148.51] gi|88182568|gb|EAQ90036.1| CHGG_06655 [Chaetomium globosum CBS 148.51]
  misc_feature (1)..(489): NCBI GI: 85118813 Blast Desc: NCU01883 [Neurospora crassa OR74A] gi|28927324|gb|EAA36278.1| [Neurospora crassa OR74A] gi|38636447|emb|CAE81983.1| related to RVS167 protein (reduced
  misc_feature (1)..(489): NCBI GI: 156058898 Blast Desc: SS1G_03461 [Sclerotinia sclerotiorum 1980] gi|154701248|gb|EDO00987.1| SS1G_03461 [Sclerotinia sclerotiorum 1980]
  misc_feature (1)..(489): NCBI GI: 145609896 Blast Desc: MGG_02891 [Magnaporthe grisea 70-15] gi|145017285|gb|EDK01648.1| MGG_02891 [Magnaporthe grisea 70-15]
  misc_feature (1)..(313): NCBI GI: 149210353 Blast Desc: MGCH7_ch7g654 [Magnaporthe grisea 70-15] gi|86196609|gb|EAQ71247.1| MGCH7_ch7g654 [Magnaporthe grisea 70-15]
  misc_feature (1)..(489): NCBI GI: 145250601 Blast Desc: An15g02760 [Aspergillus niger] gi|134082336|emb|CAK42351.1| protein product [Aspergillus niger]
  misc_feature (1)..(489): NCBI GI: 70998290 Blast Desc: SH3 domain signalling protein [Aspergillus fumigatus Af293] gi|66851504|gb|EAL91830.1| SH3 domain signalling protein [Aspergillus fumigatus Af293] gi|159126396|gb|EDP51512.1| SH3
  misc_feature (1)..(489): NCBI GI: 212530694 Blast Desc: SH3 domain signalling protein [Penicillium marneffei ATCC 18224] gi|210074902|gb|EEA28989.1| SH3 domain signalling protein [Penicillium marneffei ATCC 18224]
MQSMQRQFDRMLRKAPGDNAKVAVILSDYEDADRVLAKIIDAAKSWRDAWVNIASTQLGVITEFDGLWDPIVGASDGLGKPPAPTPELQLAQALQLKEAYAELKTELLEELGLIEARVVRPATDARDYISPLRKTIKKRENKRLDYEKVQDKATKLQRKPGKTPKEDAALQKLDVEVARTAEEFHIADAHIRQTLPPVVAATFSLIPSLVDSVLLIQNRLLGLYYTSLHAYCQEHGFPSPPPPMEDVIALWSAGYEPVKREVELITCIATGKAVRLPMKLPDDPSLQDRRTSDTSTSSLANPPRRTTSGLIPSKPAIGPRPNRIPSSTSLASQQSPVLEQRPSAGNNYITSNLTPTDFTTASRLGQGQPITPSTLSPNSLRPRTDYFGRPPSTVSNAGSTTSVNTASSFVSAAAAKKKPPPPPPPKKIASSRLEEYVVAQYPFKGEGDGDLSFREGDRIKIVKKTNTLDDWWVGELGGIRGSFPANYCK

SEQ ID NO: 40023 - DNA, 3196 bp, Muscodor strobelii
  misc_feature: SGI EST ID NO. CUFF.96676.0
  misc_feature: Variant of the nucleotide sequence at SEQ ID NO 40021
ctgaggtatcgataaccttgcgcaccgggcataaaattacagcgcctttgattttcgtactgcttttgatacacagttcgaatcaagctctctgtgttatgccagacacagcttgctttttttttttctacaggtgacagaaatagtcgttccggagttggtcgaagcaatgccactggcaggtaaattcagctctcagatctctctacctttatatttcgcaggttcagaaaacaagcaaagttcctgatgaatgtcagtggcacaatgtgcaggctatccttgcggcccaacaaggcggcaggtgtccaggcagtgagccgcgcactaataagaggcaatgaggggctgatggattaggtactttcagggtgcgttgttacacgtacctaccttagacgggcgacgggctctggatgggcctcgcgggccttcaggacgggttctagcttctaacgttggttggcttgtttcacactagagagccacaggctcttggtcgacacacttttcctggagagttgccaaatttagcaatggactcatgaactcagcacctacacatgtagatatggttcacgtgaaagtcgccgtctccctggcagtttctcttatatgaacacatcatcagaaatgctagttttactctgtttatatgtgttcgtggaagataaacttggcctgttcgtgataccgcccggtgcattatcagtttcggctttatgttgctatcaagtctgttccccaacttcggccccagaactatgacattgatagtggagattgcgcctcccagctgcatgccctgacaacctggactcaattgttcgtgagtcacagaggtgatattcggtagattagagcattcaatacgtgatcaccaatttcatcgttacgcacgcatcctcccgaaggggcaatatcaaactcattacggtacttggcctggaatatgggatagaatagctgctcaatgataaatgaggcaaggttagattcaaagttgaccatgtttcgatgacttctcggcacgtccctcctgagatctcgctagttcgtagccgattgacagccccaaagagaaggtttgagatgttgccgcatcttgccgggacccgggaaattgaccttgagcagaacctggaaagagctatgtcgaccagcttgttggcttgttcgtacttgcatcctgaaaaagctgctggatcccactgacgcactccccaaggcggtgcaacaccaaccttgcattctgtccattttgtccttctccgcctttttttaccttgtttcctgtttccctcgtctattgaatgcttttcgattgaaccctagcatcaatcattgccgtctaattcaactgtgtgcgtgccgttcacctctagcctgcatcgccgttagttttgcgtgcggattccctagctttgcctctcatttggagaccaagtagcaatcagcagcaccgacatttctcaagacgggccaatcctagggttgtgttagaccgtgagcagccaccggcccatcaaaatgcagtcaatgcagaggcaattcgatcgcatgcttcgcaaggctcctggcgacaacgcgaaggtggctgtgatcctcagtgactatgaagacgctgacagagtccttgctaagatcatcgacgcagcaaagtcatggcgtgatgcgtgggttaacattgcctcaactcaacttggagtaattactgagttcgatggtctttgggatcctatcgtcggcgcatctgacgggctcggcaagccaccagctccaacaccagagcttcaactcgcgcaagccctgcagctgaaagaagcttatgcagaactcaagacagagcttttagaggaattgggcctcatagaagcacgtgtggtgaggcctgcgactgacgctcgtgactacatttcccctctacgaaagactatcaaaaagagagagaataagagactagactatgagaaagttcaagataaggccacgaaattgcagagaaagcctggtaaaacgccaaaagaagatgcagctcttcaaaaactagatgtcgaagttgcccgcactgctgaggaattccacattgcagatgcacatatcaggcaaacactgccaccagttgtggcggcaacgttcagtctcataccgtcactagtcgactccgtgttgctgatacaaaaccgacttcttggtctctattatacatctttgcacgcctactgtcaagagcatggttttccctcgcctccgccgcctatggaagatgtcattgccctatggtctgcaggatatgagccagtgaaacgagaagttgaattgatcacatgcattgccacaggcaaagccgtgcgcttgccaatgaaacttcctgacgatccaagcctacaagatcgccgcacatccgacacatcaacatctagtctggcaaaccctccacgccgtaccacttccggcctaattccaagcaagcccgcaattgggccgcggcccaatcgcataccctcgtcgacctcattggcgtcacaacaaagtccagtgcttgagcagcgaccatcagcgggaaacaattacataacatctaaccttactcccacagacttcaccacggcgtcaaggctgggacaaggacagccgattacaccgtctaccctttcgcccaactcgttgcgtcctaggaccgactacttcggccgccctccatcgacagtctctaatgctgggtcaacaacctccgtcaacacggcttcaagttttgtatctgctgctgcagcaaaaaagaagccgccgccaccccctccgcctaagaagattgcatcgagtcgtctagaggaatatgttgtagcgcaatatccattcaaaggcgaaggcgatggtgatctctccttccgcgagggtgacagaattaagatcgtcaagaaaaccaacacgctagatgattggtgggtaggagagcttggaggcatcaggggatcttttcctgcgaactactgcaaatagtgctttgttagcagtgccgaccgcaggacggcggacattaatgcacgatggcacttaattgatggcctgtcgtactgcgatgttcttgagctatcatcggtttgagacgttggacatcgtttagtatttcatccttatgataattgcacatgatgctgttttctgagggttccatcttagcactaatgaaaagatg

SEQ ID NO: 40024 - DNA, 1227 bp, Muscodor strobelii
  misc_feature: SGI cDNA ID NO. 573941
  misc_feature: Encodes the peptide sequence at SEQ ID NO 40025
atggccaacttcgggcgctcgttcaagccttcatcgtatttcagttcgatgtcgagacgacctactggtcctacgaggaccctgtccaacatgtcgagtccatcggaaatgtcgccgctctcgtccccggatttgcggtctgacgatatcgttttctctgcccgaagctcaccggcgccgccagccgactacactcaggcaccaatgtctccacagcggtatctcagaaccagtggaacacgttcgcctccacgatctatctacatcgatgagccgtctacatcctcctcagcttcgagcaaaccgatcgccatcgaattgcccatggccagccacgcaacgcgaaccccacctgctcctctctctgctcgcggcgatctgcctggtggctattttccccttcacgaagagcaaagtcgtgtttaccgcccccatccttttcagctcgacgcctccaaggctcgtcagaagtcgatccaacgtgcgaacaaggctagtttttccgacctacaaactgccagtctaggcgacgctagcaacacacccaagcccgtcatcgccgtgacttcgccagaaaagaaccatccgacaatggaaataccgcagatgaacttgaatatggccagcgtgccctcgcccgactccgccagtgctacacacacgcccgtagcttcgtacatgcccctcggagctcaggatagcctgccgatgggcaaatattacccatcgaactataagcaaaggaaagatgccaagaggaaggcacagagtcatcgaccctcgacatcagagccgacgagttacagcaccagcaaatcggaatctcaagtgccgacattgtctcaaccatcatcgtccagttacgcatctggccatacacggaacgattctgaagcgaagcgtcgattacaacaataccagcgtgacatgattgcacaggcaacattggctttgaacggtggcgccatgaacgcagcgagtcgaacatctttacgctcgttgggtttctctaacatcgtaaagccaagcaaaccgcgattggccccgttaggaagccccggccctgtgactcctatggaactggaggcttctgacaacggataccttggcgcgcatgggaatgttgatacgcaagatgagattactcgcgccatcagggccgaggatcgaagtcgacgcgaaaacacatcttcacccgctatcgatctaggaccgagcagcttatga

SEQ ID NO: 40025 - protein, 408 aa, Muscodor strobelii
  misc_feature: SGI Peptide ID NO. 573941
  misc_feature (89)..(396): NCBI GI: 171676251 Blast Desc: protein product [Podospora anserina] gi|170936191|emb|CAP60851.1| protein product [Podospora anserina]
  misc_feature (24)..(403): NCBI GI: 85118854 Blast Desc: NCU01893 [Neurospora crassa OR74A] gi|28927334|gb|EAA36288.1| [Neurospora crassa OR74A]
  misc_feature (100)..(404): NCBI GI: 261353392 Blast Desc: conserved [Verticillium albo-atrum VaMs.102]
  misc_feature (97)..(403): NCBI GI: 116193873 Blast Desc: CHGG_06654 [Chaetomium globosum CBS 148.51] gi|88182567|gb|EAQ90035.1| CHGG_06654 [Chaetomium globosum CBS 148.51]
  misc_feature (1)..(369): NCBI GI: 256733776 Blast Desc: NECHADRAFT_67749 [Nectria haematococca mpVI 77-13-4]
  misc_feature (100)..(373): NCBI GI: 149210355 Blast Desc: MGCH7_ch7g655 [Magnaporthe grisea 70-15] gi|86196610|gb|EAQ71248.1| MGCH7_ch7g655 [Magnaporthe grisea 70-15]
  misc_feature (1)..(369): NCBI GI: 46140203 Blast Desc: FG11616.1 [Gibberella zeae PH-1]
  misc_feature (137)..(373): NCBI GI: 145609894 Blast Desc: [Magnaporthe grisea 70-15] gi|145017284|gb|EDK01647.1| [Magnaporthe grisea 70-15]
  misc_feature (93)..(387): NCBI GI: 156058454 Blast Desc: [Sclerotinia sclerotiorum 1980] gi|154701026|gb|EDO00765.1| [Sclerotinia sclerotiorum 1980]
  misc_feature (294)..(371): NCBI GI: 154273901 Blast Desc: [Ajellomyces capsulatus NAm1] gi|150415410|gb|EDN10763.1| [Ajellomyces capsulatus NAm1]
MANFGRSFKPSSYFSSMSRRPTGPTRTLSNMSSPSEMSPLSSPDLRSDDIVFSARSSPAPPADYTQAPMSPQRYLRTSGTRSPPRSIYIDEPSTSSSASSKPIAIELPMASHATRTPPAPLSARGDLPGGYFPLHEEQSRVYRPHPFQLDASKARQKSIQRANKASFSDLQTASLGDASNTPKPVIAVTSPEKNHPTMEIPQMNLNMASVPSPDSASATHTPVASYMPLGAQDSLPMGKYYPSNYKQRKDAKRKAQSHRPSTSEPTSYSTSKSESQVPTLSQPSSSSYASGHTRNDSEAKRRLQQYQRDMIAQATLALNGGAMNAASRTSLRSLGFSNIVKPSKPRLAPLGSPGPVTPMELEASDNGYLGAHGNVDTQDEITRAIRAEDRSRRENTSSPAIDLGPSSL

SEQ ID NO: 40026 - DNA, 2918 bp, Muscodor strobelii
  misc_feature: SGI EST ID NO. CUFF.96668.1
  misc_feature: Variant of the nucleotide sequence at SEQ ID NO 40024
tcagcacctgcatcattctcatatgctgacaaggctgtgtccgggtgcaaatacggccaggaccactgacaagtattcttctggctccttctcgctccagggtttggttcgcaacaatcgagcaccatttcgactatctatctccttgtgtaattcatgttattctcccttccatttttcttcttctctgactgcctaattcctgctctttgtttctccactcgtgacaattctctttggacctgacaccactacactgttgactccaacgcaacacgacacagccgaaacacaacgccacccacttgaccatcgtctcgtaggtacacaaaacacctcgtggccctcctcaaccacgaaatcactcttttccgcaccctccactccacaccacgtttaacaagagtcaaatgcccacttgccggtgattgtcgtcgccttcgccagatagagagatttaggtagcaagcaagtgggaatttccggtggagaacaggcagtgacaggccccgtttcccttccggcccgttgactcccagctccctaccaagccgaccaagcctataattccctcctcggcgctccttcaaattgccgcagcttttgctttgcggaccacattcggcgtggaattatttagtcgaaactatctgaagtggattgaacaccggttattctgcttatagagatcgagaaccccgccaatacttactaggatcactgaatgtgggttgaccggcgactgagtgccttggaggccgttttccaccgcccaacagaggatccaagatagagaccagatcttcctggcccgtacatattcctacaatccacagcttaagccatcatcaacacgcttaaggagagcaggaatctgtcttgagtagccaaaggcaggatctcgcgagccgaatacaacgcaggtgaacaaagggcatacgatcttggcactgccactcggaaacccgatcatggccaacttcgggcgctcgttcaagccttcatcgtatttcagttcgatgtcgagacgacctactggtcctacgaggaccctgtccaacatgtcgagtccatcggaaatgtcgccgctctcgtccccggatttgcggtctgacgatatcgttttctctgcccgaagctcaccggcgccgccagccgactacactcaggcaccaatgtctccacagcggtatctcagaaccagtggaacacgttcgcctccacgatctatctacatcgatgagccgtctacatcctcctcagcttcgagcaaaccgatcgccatcgaattgcccatggccagccacgcaacgcgaaccccacctgctcctctctctgctcgcggcgatctgcctggtggctattttccccttcacgaagagcaaagtcgtgtttaccgcccccatccttttcagctcgacgcctccaaggctcgtcagaagtcgatccaacgtgcgaacaaggctagtttttccgacctacaaactgccagtctaggcgacgctagcaacacacccaagcccgtcatcgccgtgacttcgccagaaaagaaccatccgacaatggaaataccgcagatgaacttgaatatggccagcgtgccctcgcccgactccgccagtgctacacacacgcccgtagcttcgtacatgcccctcggagctcaggatagcctgccgatgggcaaatattacccatcgaactataagcaaaggaaagatgccaagaggaaggcacagagtcatcgaccctcgacatcagagccgacgagttacagcaccagcaaatcggaatctcaagtgccgacattgtctcaaccatcatcgtccagttacgcatctggccatacacggaacgattctgaagcgaagcgtcgattacaacaataccagcgtgacatgattgcacaggcaacattggctttgaacggtggcgccatgaacgcagcgagtcgaacatctttacgctcgttgggtttctctaacatcgtaaagccaagcaaaccgcgattggccccgttaggaagccccggccctgtgactcctatggaactggaggcttctgacaacggataccttggcgcgcatgggaatgttgatacgcaagatgagattactcgcgccatcagggccgaggatcgaagtcgacgcgaaaacacatcttcacccgctatcgatctaggaccgagcagcttatgacccgtgcgctggggcttttgtcctttttagacagctactagtctcacgtcgactaaggactcatccgacctattctcccggatcggcatgaaacaatgcacggctactcctagccagtcatactcactgtcaggaggacggttgctcttgctgttcggggttcatctgcgacaccaaaattacaccggcaccatgttgccattcatagtatgcattcgatgatacccatatgcttttttggatagaatcgccggaaaggtaattcgttgcgatgtttttatgcgaaatctgaggcccaacaacggcactcgaagcttgatcagcaaagacgtcaaactacatttagctatcgtgactattcggttacagtcgtatttttctgtttgtttttcgtcgtaaacattcgcttacgacgggtcttttgggcgtccacaaaagaaatcaaaagtttcggtcttatgttacgcatgttgcctgcctatgagagcggctttacttgttccaaaggagaaattcataggcagtggaggaagaggcatgaatagatgctaggatgaagatcggagatctgatgaatagacgcgattatgagatgaaagataagaaaacgccgattgcaagtcatgagcgaacggtaatcgtctaagagatagaattactgatatcctgtcactgctgatgacaatgaattcaatcttacgcgtcaatttgagattcagg

SEQ ID NO: 40027 - DNA, 465 bp, Muscodor strobelii
  misc_feature: SGI cDNA ID NO. 573942
  misc_feature: Reduced expression when VOC is produced
  misc_feature: Encodes the peptide sequence at SEQ ID NO 40028
atgggcgtcttcggcatggccttgagctatgtgctcttttcggttctacattttttccaatttgtgctcgctatcactgtcatcggactctacggtacagacctcaataatgcccataggcagggcaagtacaccgatggaaaatgggtctatgcgatcgtcgtcgcagtcctatctgccataacagccatcctctacttcattcctttcatcctccgattcgccgcagtctcaatatggagtttcatcctcttcgttctctggattgccctcttcggtctgttcggttctatgtatatccacgaaaacccggagggcaacgccggtgttcaacgcatgaaaaatgcggtctgggtcgatctcgcaaatgcgctcctatggcttttcgggttcgttgcctctgcgacatactggtggagccaccgcgaccgtcacagccgcttcacaggcagggccaaggtctaa

SEQ ID NO: 40028 - protein, 154 aa, Muscodor strobelii
  misc_feature: SGI Peptide ID NO. 573942
  misc_feature (1)..(154): NCBI GI: 256733775 Blast Desc: NECHADRAFT_67747 [Nectria haematococca mpVI 77-13-4]
  misc_feature (1)..(154): NCBI GI: 171676253 Blast Desc: protein product [Podospora anserina] gi|170936192|emb|CAP60852.1| protein product [Podospora anserina]
  misc_feature (9)..(154): NCBI GI: 39970853 Blast Desc: MGG_02893 [Magnaporthe grisea 70-15] gi|149210357|ref|XP_001522553.1| MGCH7_ch7g656 [Magnaporthe grisea 70-15] gi|86196611|gb|EAQ71249.1| MGCH7_ch7g656 grisea
  misc_feature (2)..(154): NCBI GI: 261353393 Blast Desc: conserved [Verticillium albo-atrum VaMs.102]
  misc_feature (17)..(154): NCBI GI: 116193869 Blast Desc: CHGG_06652 [Chaetomium globosum CBS 148.51] gi|88182565|gb|EAQ90033.1| CHGG_06652 [Chaetomium globosum CBS 148.51]
  misc_feature (9)..(154): NCBI GI: 164429531 Blast Desc: NCU01891 [Neurospora crassa OR74A] gi|157073516|gb|EAA36286.2| conserved [Neurospora crassa OR74A]
  misc_feature (4)..(153): NCBI GI: 154310620 Blast Desc: BC1G_06784 [Botryotinia fuckeliana B05.10] gi|150851324|gb|EDN26517.1| BC1G_06784 [Botryotinia fuckeliana B05.10]
  misc_feature (4)..(153): NCBI GI: 156058460 Blast Desc: SS1G_03241 [Sclerotinia sclerotiorum 1980] gi|154701029|gb|EDO00768.1| SS1G_03241 [Sclerotinia sclerotiorum 1980]
  misc_feature (50)..(154): NCBI GI: 46140201 Blast Desc: FG11615.1 [Gibberella zeae PH-1]
  misc_feature (15)..(152): NCBI GI: 189188656 Blast Desc: conserved [Pyrenophora tritici-repentis Pt-1C-BFP] gi|187972273|gb|EDU39772.1| conserved [Pyrenophora tritici-repentis Pt-1C-BFP]
  misc_feature: Useful for introducing or modulating the production of volatile compounds
MGVFGMALSYVLFSVLHFFQFVLAITVIGLYGTDLNNAHRQGKYTDGKWVYAIVVAVLSAITAILYFIPFILRFAAVSIWSFILFVLWIALFGLFGSMYIHENPEGNAGVQRMKNAVWVDLANALLWLFGFVASATYWWSHRDRHSRFTGRAKV

SEQ ID NO: 40029 - DNA, 1271 bp, Muscodor strobelii
  misc_feature: SGI EST ID NO. CUFF.96901.1
  misc_feature: Variant of the nucleotide sequence at SEQ ID NO 40027
gtggccgccggcactgattacatcaccactactagcgcgtcaatgagatgatgatccaaattgcgatttccttggtatgatctgagtagcgcccaaagcttgtctcgactcgtgaaagatggcgctagagcaatttcaagatcttctctccattcccccgctacgacccttcattcccaagttcctgaaattgttcacatccgcatcgcaattaggcgtggtccaacttcgactttctcatcctctcagaactttcagttgcgccgaaacgcctgcttgaagaccacccggttcattgtcacctgccccgcgtcgcatacctcgacacgctaagatgggcgtcttcggcatggccttgagctatgtgctcttttcggttctacattttttccaatttgtgctcgctatcactgtcatcggactctacggtacagacctcaataatgcccataggcagggcaagtacaccgatggaaaatgggtctatgcgatcgtcgtcgcagtcctatctgccataacagccatcctctacttcattcctttcatcctccgattcgccgcagtctcaatatggagtttcatcctcttcgttctctggattgccctcttcggtctgttcggttctatgtatatccacgaaaacccggagggcaacgccggtgttcaacgcatgaaaaatgcggtctgggtcgatctcgcaaatgcgctcctatggcttttcgggttcgttgcctctgcgacatactggtggagccaccgcgaccgtcacagccgcttcacaggcagggccaaggtctaaagtctgagactttaacgtggatatcggtgcagggcagagggcgtacacgattttggtgacatggcgcgaatgggaaataaacagggcgcattgaaattcgaagcataaagtccacctggcgctgaggtgacgtaatgtttattgaagtataacttaatgagagcttgtcagcctcgtatattaatcataactcaaatatctaaccatcattggactttatttgctcgtttacacgacacggacagcaacaaatttgcagataaatcgacaacaagaaatccagtatatgagttcgcaacttgaatcgtgaatcgatctcgaatggcctcgatattttggtaccgtgcgccgtcgaaagtgactcgaatcaaacctacggatgtacatacagtagtgcgctaaaatagcagcattttcaacccatcatatccctgaaccatctcatcatggttcagggctcaacatagttcaa

SEQ ID NO: 40030 - DNA, 948 bp, Muscodor strobelii
  misc_feature: SGI cDNA ID NO. 573943
  misc_feature: Elevated expression when VOC is produced
  misc_feature: Encodes the peptide sequence at SEQ ID NO 40031
atggcacaggcagaaacgtcgcttcatccagctttcatctccatagatgggctgcccaattttcgagacgcaggcggttatgaagtagtctcccgagaccctctcagtcctgggtcaaatggaaagcgcaggatcaaaatggtccgaaaaggcgttctgtttagatcctcagaaccatcaaaaataacactaaagggagaggagatgctcaaccccttagggatcaaaatagtctacgacctacgctcccagaccgagattacttccgggtacgctaaatctacccaagggtcgccactttggcctatcaaggagctggagggggccaaaagggaattcgtacctgtgttcctcgatcaggactattcccctgaagtattggcactgcgattcaagaattacgctgctgtaactgatgacggcttcgtcaaagcatacaaggatatactagaggcggcgaccgatatcaacaatgaatatcagccttacaggaagatcttaggacacctcgcgtcggttccttcagcttctctctcagcgcctgagccttgcctcgtacattgtacggcaggcaaggaccgaaccggtgtgatcgttgcgctggttctcagcttatgtggcgtccccgatgaagctatagttcatgagtacaacctaacggagatcggtctgcaagctcgcattgcggagctggtaaaacatctctcctctaatccggagatgggtattgatgaggcagcggcgaagcgaatggcaggtgctcggaaaggggctatgcgaggcacactcgagcggatccgcagacaatatggatctgtcgagcaatgtgtgctcgacactggtatgctcacacctgagggcatcgcgcagctacggaagaacatgatcgtcgagtgcgatgcagacgaggctgttccgtgggaggaacatgcgaagcttcgactatag

SEQ ID NO: 40031 - protein, 315 aa, Muscodor strobelii
  misc_feature: SGI Peptide ID NO. 573943
  misc_feature (8)..(312): NCBI GI: 145609888 Blast Desc: MGG_02895 [Magnaporthe grisea 70-15] gi|145017280|gb|EDK01643.1| MGG_02895 [Magnaporthe grisea 70-15]
  misc_feature (5)..(305): NCBI GI: 156040724 Blast Desc: SS1G_11340 [Sclerotinia sclerotiorum 1980] gi|154695724|gb|EDN95462.1| SS1G_11340 [Sclerotinia sclerotiorum 1980]
  misc_feature (10)..(311): NCBI GI: 116193865 Blast Desc: CHGG_06650 [Chaetomium globosum CBS 148.51] gi|88182563|gb|EAQ90031.1| CHGG_06650 [Chaetomium globosum CBS 148.51]
  misc_feature (6)..(297): NCBI GI: 256734280 Blast Desc: NECHADRAFT_103887 [Nectria haematococca mpVI 77-13-4]
  misc_feature (12)..(297): NCBI GI: 46130692 Blast Desc: FG08950.1 [Gibberella zeae PH-1]
  misc_feature (5)..(292): NCBI GI: 154303814 Blast Desc: BC1G_08791 [Botryotinia fuckeliana B05.10] gi|150854375|gb|EDN29567.1| BC1G_08791 [Botryotinia fuckeliana B05.10]
  misc_feature (10)..(313): NCBI GI: 85118837 Blast Desc: NCU01889 [Neurospora crassa OR74A] gi|28927330|gb|EAA36284.1| [Neurospora crassa OR74A]
  misc_feature (8)..(312): NCBI GI: 149210363 Blast Desc: MGCH7_ch7g659 [Magnaporthe grisea 70-15] gi|86196614|gb|EAQ71252.1| MGCH7_ch7g659 [Magnaporthe grisea 70-15]
  misc_feature (10)..(298): NCBI GI: 258570719 Blast Desc: [Uncinocarpus reesii 1704] gi|237904433|gb|EEP78834.1| [Uncinocarpus reesii 1704]
  misc_feature (5)..(298): NCBI GI: 119183798 Blast Desc: CIMG_06785 [Coccidioides immitis RS]
  misc_feature: Useful for introducing or modulating the production of volatile compounds
MAQAETSLHPAFISIDGLPNFRDAGGYEVVSRDPLSPGSNGKRRIKMVRKGVLFRSSEPSKITLKGEEMLNPLGIKIVYDLRSQTEITSGYAKSTQGSPLWPIKELEGAKREFVPVFLDQDYSPEVLALRFKNYAAVTDDGFVKAYKDILEAATDINNEYQPYRKILGHLASVPSASLSAPEPCLVHCTAGKDRTGVIVALVLSLCGVPDEAIVHEYNLTEIGLQARIAELVKHLSSNPEMGIDEAAAKRMAGARKGAMRGTLERIRRQYGSVEQCVLDTGMLTPEGIAQLRKNMIVECDADEAVPWEEHAKLRL

SEQ ID NO: 40032 - DNA, 3346 bp, Muscodor strobelii
  misc_feature: SGI EST ID NO. CUFF.96915.0
  misc_feature: Variant of the nucleotide sequence at SEQ ID NO 40030
ctgtggtgagcaattttggtctatatttccgacagcctgcctaggccgtacctacgagattaaacatcatgtcgcccaccacaagcgaccgatatgcaacaatttacgggaaggtccggtaaaaatctttgtttcgtggtcgttgatgaagaagttgcatttttagaattaggtatgaaagatgatgagacttgggcgtcgctcccgtgggtactttctggggcgcctacaaccaatcataaagcgagctcggaagtagctaggtaggtgagcatgctccttcctctcacctcaacccccaaaagccagggatagcaacccggcgaaagatatcctctactattgagttcttgagtacctagatagtcaaaagcatagcagcgtcgagctaaggtgatagccacggcgcctcagatttggccactttgggcactaaattaaaccttcactagcaaattcaggataaggagaagaaagacatcatggcacaggcagaaacgtcgcttcatccagctttcatctccatagatgggctgcccaattttcgagacgcaggcggttatgaagtagtctcccgagaccctctcagtcctgggtcaaatggaaagcgcaggatcaaaatggtccgaaaaggcgttctgtttagatcctcagaaccatcaaaaataacactaaagggagaggagatgctcaaccccttagggatcaaaatagtctacgacctacgctcccagaccgagattacttccgggtacgctaaatctacccaagggtcgccactttggcctatcaaggagctggagggggccaaaagggaattcgtacctgtgttcctcgatcaggactattcccctgaagtattggcactgcgattcaagaattacgctgctgtaactgatgacggcttcgtcaaagcatacaaggatatactagaggcggcgaccgatatcaacaatgaatatcagccttacaggaagatcttaggacacctcgcgtcggttccttcagcttctctctcagcgcctgagccttgcctcgtacattgtacggcaggcaaggaccgaaccggtgtgatcgttgcgctggttctcagcttatgtggcgtccccgatgaagctatagttcatgagtacaacctaacggagatcggtctgcaagctcgcattgcggagctggtaaaacatctctcctctaatccggagatgggtattgatgaggcagcggcgaagcgaatggcaggtgctcggaaaggggctatgcgaggcacactcgagcggatccgcagacaatatggatctgtcgagcaatgtgtgctcgacactggtatgctcacacctgagggcatcgcgcagctacggaagaacatgatcgtcgagtgcgatgcagacgaggctgttccgtgggaggaacatgcgaagcttcgactatagtcgctggctgaattactggtaggctatcatcatgctttatcggcaaagtcttagcgtttctgccatgttcgagagcgagtatcatacctcaacggaggtcaacagccgtcaatatactcgcaataattacaagcggaccaggaacgaggatatgtcaaggtggcggaagcaggctaaaagatattacggctctacagatagccaggctgaacaaagactcgacccaagacgacacgatgcattgcgttatgaggtaaaagatttggtttgatacgatgggtatagacagccaatatacattctacatagatagacaatccaagtatctatacactagacgggaggtcaactaacacccggtcgacgatatctgcgatgattgacttcgcaggtgtatggtatttacataaggccacttttgggccgtgattagacacgctcgttctttatacaatacgtctctcgaatacactgttcatacaacattggacgacatcacccagcagcagatcaaggcgccggcgcctgggtgggaatcttgatctggtgatctttggcacgatcagggtaaggcgtaccgtaacgccagccgacagcattacggctcctacccttgtggccgacagcctcggcgttgaagtccttgaagcggaactcgaagcggtctgtgttgacgcggttgatcttcttctcctcggcggcgaccttggcctgctgcttctcagcggctttgcgctcggactccatggcggcttgcttgaagcgttccgatgcatcccagagcggacgtccctcggcgacctcgcgctccatctgtactagctccgggtgcggtatacgcttatctgctgatagaagcgtggggtggaaggccttcgccgcatcctctcgtgtgaagtgctttgactcggaggttggccagaagatctgctgcatcgctaagggatgcacgtggatttcgttgatgcgctcgtaagggtcattctgctggtctgtcttgatcctccatgtgggaaccattgataatacggccttggcatacggctttaccagacgctcaccctatcgcgagaactcatgtcagcagatgcagatactatttgtttgacacgtaacgagtattgcggtgacgtatggggtcagagaggctcgcaacaatgtttgtaaccatgtagttgtcttcaagacttatcgaattgggtagttggcagttcatcatagaaaagggcgccgcagagctgagcagaagggtgttgcggaggtgagcttaccttggctatccagtccttctcgacctcttttaaccggacgatggcggcaactctgcgaatgtcgatgccaaactcggcagacacagacttgatggtctcgccgtggcgcatgatcttctcccacaccagctcgcgggcggcatcgtcgagcacggggtggctgacgaagtgcttatttatggggaaagggaatttcttgttgccctgctcgtcgaagacgagattgctggcgagataattgggagtgcccggtgtccgatggatcttgtagacgctgccgcgctctgcctcccatttcctgaagtcgcgacggcgctgcgagaatctgggtcgagctaccgatgtggaaaaggctgccgtagcttgctggcgcgatgcctgtgaaaggcacactgacgcggcattgctctgatgcaatatggccgaggcgtcaatggcctgtgttggtattcttggtggcattgtattgatgtgaatgtggacgctctcgactcctcgggcgaggaggagttgaaaggtgtggatgagagacggatgtcgaaatttgctagacggcaggattggtgtagcttcgaaaaattatgggttcgcggaacccgaactaacgactcaggagaattaaggatgtcggtttacacatcttag

SEQ ID NO: 40033 - DNA, 1014 bp, Muscodor strobelii
  misc_feature: SGI cDNA ID NO. 573944
  misc_feature: Reduced expression when VOC is produced
  misc_feature: Encodes the peptide sequence at SEQ ID NO 40034
atgccaccaagaataccaacacaggccattgacgcctcggccatattgcatcagagcaatgccgcgtcagtgtgcctttcacaggcatcgcgccagcaagctacggcagccttttccacatcggtagctcgacccagattctcgcagcgccgtcgcgacttcaggaaatgggaggcagagcgcggcagcgtctacaagatccatcggacaccgggcactcccaattatctcgccagcaatctcgtcttcgacgagcagggcaacaagaaattccctttccccataaataagcacttcgtcagccaccccgtgctcgacgatgccgcccgcgagctggtgtgggagaagatcatgcgccacggcgagaccatcaagtctgtgtctgccgagtttggcatcgacattcgcagagttgccgccatcgtccggttaaaagaggtcgagaaggactggatagccaagggtgagcgtctggtaaagccgtatgccaaggccgtattatcaatggttcccacatggaggatcaagacagaccagcagaatgacccttacgagcgcatcaacgaaatccacgtgcatcccttagcgatgcagcagatcttctggccaacctccgagtcaaagcacttcacacgagaggatgcggcgaaggccttccaccccacgcttctatcagcagataagcgtataccgcacccggagctagtacagatggagcgcgaggtcgccgagggacgtccgctctgggatgcatcggaacgcttcaagcaagccgccatggagtccgagcgcaaagccgctgagaagcagcaggccaaggtcgccgccgaggagaagaagatcaaccgcgtcaacacagaccgcttcgagttccgcttcaaggacttcaacgccgaggctgtcggccacaagggtaggagccgtaatgctgtcggctggcgttacggtacgccttaccctgatcgtgccaaagatcaccagatcaagattcccacccaggcgccggcgccttga

SEQ ID NO: 40034 - protein, 337 aa, Muscodor strobelii
  misc_feature: SGI Peptide ID NO. 573944
  misc_feature (1)..(335): NCBI GI: 256733773 Blast Desc: NECHADRAFT_36678 [Nectria haematococca mpVI 77-13-4]
  misc_feature (29)..(334): NCBI GI: 85118858 Blast Desc: NCU01894 [Neurospora crassa OR74A] gi|28927335|gb|EAA36289.1| conserved [Neurospora crassa OR74A]
  misc_feature (1)..(333): NCBI GI: 39970859 Blast Desc: MGG_02896 [Magnaporthe grisea 70-15] gi|149210365|ref|XP_001522557.1| MGCH7_ch7g660 [Magnaporthe grisea 70-15] gi|86196615|gb|EAQ71253.1| MGCH7_ch7g660 grisea
  misc_feature (1)..(335): NCBI GI: 46130690 Blast Desc: FG08949.1 [Gibberella zeae PH-1]
  misc_feature (1)..(333): NCBI GI: 116193863 Blast Desc: CHGG_06649 [Chaetomium globosum CBS 148.51] gi|88182562|gb|EAQ90030.1| CHGG_06649 [Chaetomium globosum CBS 148.51]
  misc_feature (33)..(335): NCBI GI: 261353394 Blast Desc: conserved [Verticillium albo-atrum VaMs.102]
  misc_feature (84)..(332): NCBI GI: 154303812 Blast Desc: BC1G_08790 [Botryotinia fuckeliana B05.10] gi|150854374|gb|EDN29566.1| BC1G_08790 [Botryotinia fuckeliana B05.10]
  misc_feature (84)..(332): NCBI GI: 156040722 Blast Desc: SS1G_11339 [Sclerotinia sclerotiorum 1980] gi|154695723|gb|EDN95461.1| SS1G_11339 [Sclerotinia sclerotiorum 1980]
  misc_feature (14)..(332): NCBI GI: 171676261 Blast Desc: protein product [Podospora anserina] gi|170936196|emb|CAP60856.1| protein product [Podospora anserina]
  misc_feature (92)..(336): NCBI GI: 169613150 Blast Desc: SNOG_09706 [Phaeosphaeria nodorum SN15] gi|111061851|gb|EAT82971.1| SNOG_09706 [Phaeosphaeria nodorum SN15]
  misc_feature: Useful for introducing or modulating the production of volatile compounds
MPPRIPTQAIDASAILHQSNAASVCLSQASRQQATAAFSTSVARPRFSQRRRDFRKWEAERGSVYKIHRTPGTPNYLASNLVFDEQGNKKFPFPINKHFVSHPVLDDAARELVWEKIMRHGETIKSVSAEFGIDIRRVAAIVRLKEVEKDWIAKGERLVKPYAKAVLSMVPTWRIKTDQQNDPYERINEIHVHPLAMQQIFWPTSESKHFTREDAAKAFHPTLLSADKRIPHPELVQMEREVAEGRPLWDASERFKQAAMESERKAAEKQQAKVAAEEKKINRVNTDRFEFRFKDFNAEAVGHKGRSRNAVGWRYGTPYPDRAKDHQIKIPTQAPAP

SEQ ID NO: 40035 - DNA, 2534 bp, Muscodor strobelii
  misc_feature: SGI EST ID NO. CUFF.96916.3
  misc_feature: Variant of the nucleotide sequence at SEQ ID NO 40033
gcaaatttcgacatccgtctctcatccacacctttcaactcctcctcgcccgaggagtcgagagcgtccacattcacatcaatacaatgccaccaagaataccaacacaggccattgacgcctcggccatattgcatcagagcaatgccgcgtcagtgtgcctttcacaggcatcgcgccagcaagctacggcagccttttccacatcggtagctcgacccagattctcgcagcgccgtcgcgacttcaggaaatgggaggcagagcgcggcagcgtctacaagatccatcggacaccgggcactcccaattatctcgccagcaatctcgtcttcgacgagcagggcaacaagaaattccctttccccataaataagcacttcgtcagccaccccgtgctcgacgatgccgcccgcgagctggtgtgggagaagatcatgcgccacggcgagaccatcaagtctgtgtctgccgagtttggcatcgacattcgcagagttgccgccatcgtccggttaaaagaggtcgagaaggactggatagccaagggtgagcgtctggtaaagccgtatgccaaggccgtattatcaatggttcccacatggaggatcaagacagaccagcagaatgacccttacgagcgcatcaacgaaatccacgtgcatcccttagcgatgcagcagatcttctggccaacctccgagtcaaagcacttcacacgagaggatgcggcgaaggccttccaccccacgcttctatcagcagataagcgtataccgcacccggagctagtacagatggagcgcgaggtcgccgagggacgtccgctctgggatgcatcggaacgcttcaagcaagccgccatggagtccgagcgcaaagccgctgagaagcagcaggccaaggtcgccgccgaggagaagaagatcaaccgcgtcaacacagaccgcttcgagttccgcttcaaggacttcaacgccgaggctgtcggccacaagggtaggagccgtaatgctgtcggctggcgttacggtacgccttaccctgatcgtgccaaagatcaccagatcaagattcccacccaggcgccggcgccttgatctgctgctgggtgatgtcgtccaatgttgtatgaacagtgtattcgagagacgtattgtataaagaacgagcgtgtctaatcacggcccaaaagtggccttatgtaaataccatacacctgcgaagtcaatcatcgcagatatcgtcgaccgggtgttagttgacctcccgtctagtgtatagatacttggattgtctatctatgtagaatgtatattggctgtctatacccatcgtatcaaaccaaatcttttacctcataacgcaatgcatcgtgtcgtcttgggtcgagtctttgttcagcctggctatctgtagagccgtaatatcttttagcctgcttccgccaccttgacatatcctcgttcctggtccgcttgtaattattgcgagtatattgacggctgttgacctccgttgaggtatgatactcgctctcgaacatggcagaaacgctaagactttgccgataaagcatgatgatagcctaccagtaattcagccagcgactatagtcgaagcttcgcatgttcctcccacggaacagcctcgtctgcatcgcactcgacgatcatgttcttccgtagctgcgcgatgccctcaggtgtgagcataccagtgtcgagcacacattgctcgacagatccatattgtctgcggatccgctcgagtgtgcctcgcatagcccctttcctagatacgacgacatggtgtcagctctcgcggctatcacatgctagaatgattaggggtgtgtggtattctaggcaaggctgccgtcaggtaggacagagtaatatcaacgtcgagtgtcacatatccacatggaatgtagctcttccctcgcctcggaccgaatgcttcttacatgaaggcagacaccaagggctaacctagactaccatcgtttctcacgatgcgaggtgacgtgtggggcgtcggttattgtggcagacgaggaggaggaagcgtaggttctaacatcagctcgcctggcgttgggcccgtctctaacttcaaggtcgcagaccttcaccggaccttctccccgaggcgcacttctcttcgcggaccccgatttcaggtgcagcaaaccccaaaagggagaggcaggggagggatagcccccaatggattttgagttttcggccggcaggatgaaaggaggatgtagtgcagatacgagaggggattatgagagtattgaaagcgaggaacagaaggatgagatcttctggggagaaggaataaggacaaaggtcttaccgagcacctgccattcgcttcgccgctgcctcatcaatacccatctccggattagaggagagatgttttaccagctccgcaatgcgagcttgcagaccgatctccgttaggctataccagtcgaagaagcaaaatcagtcgatgttggtatgataaatggctttgta

SEQ ID NO: 40036 - DNA, 360 bp, Muscodor strobelii
  misc_feature: SGI cDNA ID NO. 573945
  misc_feature: Elevated expression when VOC is produced
  misc_feature: Encodes the peptide sequence at SEQ ID NO 40037
atgccgcagcctcaggtgcagcttgccccgcggtatccggaagcaatggcctcggcttcttgcgccggcggttcgcccaattccgaccagtcgacccccatcgcctgctcatgtgcctgtaacggacagcaccgcatggacgccgaagatcctctaatccgcggattaagcgaattgacagacatgctcggccaagtgattacctcaaatgcggcaatatcgcaacagctgactgccctgacccaaacccaagagagcacatgggcgcaggttgtgggcattcttcaggtgtgcctaggacagaacgcggggatgccaattgcaggcgaggttgttcccggtcagttctttgcacagtga

SEQ ID NO: 40037 - protein, 119 aa, Muscodor strobelii
  misc_feature: SGI Peptide ID NO. 573945
  misc_feature: Useful for introducing or modulating the production of volatile compounds
MPQPQVQLAPRYPEAMASASCAGGSPNSDQSTPIACSCACNGQHRMDAEDPLIRGLSELTDMLGQVITSNAAISQQLTALTQTQESTWAQVVGILQVCLGQNAGMPIAGEVVPGQFFAQ

SEQ ID NO: 40038 - DNA, 1219 bp, Muscodor strobelii
  misc_feature: SGI EST ID NO. CUFF.96904.2
  misc_feature: Variant of the nucleotide sequence at SEQ ID NO 40036
atttgagctttcgctcatattaataatgacggcgacgctcgcatcatgcttggtaacagacttgaataactatagtatgaaaactctagaacgcaaacctggaccggacaaggggacaaagattgattgtcagcacaaaccgttcagttctacatacatcaactagcaggccttgccacaggttcgggagcgggcgatgttggtcattggcgattttctcggccttcacattcctactccgcaaggacaaacagacagcaagggaggatagcatcggacgtttaaatcatctctccgtgttcaccttatatatacgtaacgtaggtgggcatgcggcacagatctggttctcataccatctgctttttaagttctcattgtaaaccggagttttcgctttagaaaatggcgtcaaatcgaacaagcccagggaatcccctccaaatctcgcaatctcaggcggaacgtggccccaatcaggaccacaacaggcgtcgacggcgacgtggtccatactcaatgccgcagcctcaggtgcagcttgccccgcggtatccggaagcaatggcctcggcttcttgcgccggcggttcgcccaattccgaccagtcgacccccatcgcctgctcatgtgcctgtaacggacagcaccgcatggacgccgaagatcctctaatccgcggattaagcgaattgacagacatgctcggccaagtgattacctcaaatgcggcaatatcgcaacagctgactgccctgacccaaacccaagagagcacatgggcgcaggttgtgggcattcttcaggtgtgcctaggacagaacgcggggatgccaattgcaggcgaggttgttcccggtcagttctttgcacagtgatgacggatcgggttcatttgtgtatatacatgaagtgcgaaactcactagactggatgtgtgagcaattcttcacagaatacgtaatagccacaccaatattgtttattggcttttgttttttactgtaccttcacaaatccgagttgcaacttcgtagcagtgtccaattcaggcatgtgcttccgacggcctttcgagtccattggttcgatctcgacattggctaccgacaggacggcacgctagagcaagaaccatgcatgctcaagcagctgtgcagtccgccagcagcattggaaacgggcaggtgggagtctcacggaatgcatcatagctat

SEQ ID NO: 40039 - DNA, 1674 bp, Muscodor strobelii
  misc_feature: SGI cDNA ID NO. 573946
  misc_feature: Encodes the peptide sequence at SEQ ID NO 40040
atgagttccaccccttccaccaatcctcctaatcctattgccacaatcaccaacaagctagggtacgaagtggacatctacgatgtttctaaagccgatactagtacgaaggggccgttagtgtatcgacttctagccactgtgcctaatggcgccactgcccagcaggtgcaaaccattcgccgtgcaagccaactacaagccatgcgtacaggcaatatcatagcactaaacaataactactaccagcagtttcctgtggacgtgctggtagttttgcctttcggtgatccagccaacttcactctcaatagtcctatgcagcaagctatggaggactccttcaagttcataaagtacacgcaggctaacccctcctcgcaaatggctacgaagtttcgcacagccctgggcgacaaaatcagccagaaaaatgcagtcgatacttttttccaaggcactgtcagctttcagaaatgcacaatgagtacatggacgacagtattcagctggcaagcccagttcacgaacgcctggcagggtttctattatctctacagtctgggtagcagcagcagtgctggtagcactacaaattcaacagccccggctctggtagcaacgcttgtcatcacggccagcgtaactaccagttctgcggtgctgacaatggctggcacggacaacgagaatacgccggtagtgatggcaggcgacggcacaatgggggagcaaaacccgggcactggcaacctttccgtagcgctgaccccgacctggatgaacataactcagaactcccagcagaatgacaagactatatccaactatgtcattgcagctatgttcatgggcgaaatcaatggggtgaaagtggctggcaacctcaatcagatggccatcccaaacacctcgaatacctccaagaacgctactagtcagaattcggctaataccttcatattcagcgccgtcactaccctggcgggattattgataaatgctggtatgctttatttccaggctaagggccacaagacggcagagacgcaaaagaagaacgatgcgcagaaagatgcaaccagcgaggcggatgcgaaagcgaaagacgagaaagttgaattggactatcaggccaatgaagtgtctctcgtgcgtacagaatccaaacaattggaggtcaccactgtgccaaatgtgtcgagtgcctataaacaggtcaaccaggccaccgacatccaagccaagctaactactgtaaaaaagcaggaggataaattaaaagaagttttggaggatgaacctgcgtcacaggccactgacgaagcggcttcaaacctcgagttggctagcaccgacctggacacagcgatgaatcctgccacaagcgccgctgagcgcgatgcagccatgacgagagctaccaccacgctcgagagtacgagtgagcaactagacacagtgttgaaagatcaacccatcgatatgtcagaagctgagagacaagcgttaacagacgccaaggatgctttgaatgaagcgaaagaccaagccgatgccgtagagaagaatgaacaagagcaacaggaccaggacgagaacgatgggacagaacctgttaatgaagaacagttcgataatgctatgtcagaagacctagccccccttgtataa

SEQ ID NO: 40040 - protein, 557 aa, Muscodor strobelii
  misc_feature: SGI Peptide ID NO. 573946
  misc_feature (15)..(547): NCBI GI: 46138227 Blast Desc: FG10628.1 [Gibberella zeae PH-1]
  misc_feature (73)..(212): NCBI GI: 83645911 Blast Desc: HCH_03158 [Hahella chejuensis KCTC 2396] gi|83633954|gb|ABC29921.1| conserved [Hahella chejuensis KCTC 2396]
MSSTPSTNPPNPIATITNKLGYEVDIYDVSKADTSTKGPLVYRLLATVPNGATAQQVQTIRRASQLQAMRTGNIIALNNNYYQQFPVDVLVVLPFGDPANFTLNSPMQQAMEDSFKFIKYTQANPSSQMATKFRTALGDKISQKNAVDTFFQGTVSFQKCTMSTWTTVFSWQAQFTNAWQGFYYLYSLGSSSSAGSTTNSTAPALVATLVITASVTTSSAVLTMAGTDNENTPVVMAGDGTMGEQNPGTGNLSVALTPTWMNITQNSQQNDKTISNYVIAAMFMGEINGVKVAGNLNQMAIPNTSNTSKNATSQNSANTFIFSAVTTLAGLLINAGMLYFQAKGHKTAETQKKNDAQKDATSEADAKAKDEKVELDYQANEVSLVRTESKQLEVTTVPNVSSAYKQVNQATDIQAKLTTVKKQEDKLKEVLEDEPASQATDEAASNLELASTDLDTAMNPATSAAERDAAMTRATTTLESTSEQLDTVLKDQPIDMSEAERQALTDAKDALNEAKDQADAVEKNEQEQQDQDENDGTEPVNEEQFDNAMSEDLAPLV

SEQ ID NO: 40041 - DNA, 701 bp, Muscodor strobelii
  misc_feature: SGI EST ID NO. CUFF.96712.0
  misc_feature: Variant of the nucleotide sequence at SEQ ID NO 40039
cagaaagatgcaaccagcgaggcggatgcgaaagcgaaagacgagaaagttgaattggactatcaggccaatgaagtgtctctcgtgcgtacagaatccaaacaattggaggtcaccactgtgccaaatgtgtcgagtgcctataaacaggtcaaccaggccaccgacatccaagccaagctaactactgtaaaaaagcaggaggataaattaaaagaagttttggaggatgaacctgcgtcacaggccactgacgaagcggcttcaaacctcgagttggctagcaccgacctggacacagcgatgaatcctgccacaagcgccgctgagcgcgatgcagccatgacgagagctaccaccacgctcgagagtacgagtgagcaactagacacagtgttgaaagatcaacccatcgatatgtcagaagctgagagacaagcgttaacagacgccaaggatgctttgaatgaagcgaaagaccaagccgatgccgtagagaagaatgaacaagagcaacaggaccaggacgagaacgatgggacagaacctgttaatgaagaacagttcgataatgctatgtcagaagacctagccccccttgtataataggctggactggggcgctcatcagcactatcccaaacatcatcaagcgctcgctgatgcatcaacgctttatggagtatcaaatggttgtaaac

SEQ ID NO: 40042 - DNA, 2640 bp, Muscodor strobelii
  misc_feature: SGI cDNA ID NO. 573947
  misc_feature: Encodes the peptide sequence at SEQ ID NO 40043
atgtctgctaacacagtatcttttgtcaatagcttggacttcagtgtcacagtctacgactcattcggcgaacagggtaataccaattattttggtaccttgacctcgcttacaacggtaccggctaataccacggcttccgtgcagctaagtcgtccagtctccaccctgattatcagcaatacaacgaccaatgctcccctggcacgacgcattcatttgccagagcgcagcaccggtccgctcagcgtggggcaggctgacgtgaatgccatggctcaaaccatggcgttcattgcctttatcagcagtaacccgaatgatccgctcacggttgccttccaatctctctggagagataactcaaagccacaggtcacgccggtaaaccaattctttgtccaacatacgacctacgcgagctgcacgtttgctacctatatgatgggcatcacgtatatggccgagttgccaacgagcaaaggcaagcccctggaacaggccctgtattcgctcagtagtctcgtggctcaactgggtggaacctggccgtcaggctttcctgacatcggggtgaccaagttcacttgcaatactcacaacgatgtacttgccattcgagccgatatagacttgaagaagctacccgcccagtcagatgaagcactgcaattttttggatcgttatttcaagtgcaggtgcttcaggtagcggtcactttcaactacggcttcagcttagacgtgttgggcacccgtctctccattagcctcgatgctatgcaggtaccctttggcgactcaaaaacgttgaacatcaataaaccaacggtcaccattgacataaacccactcttcaagttcgtcgttttcaccgtcgctggcagcattccattcaacatattcgaaaagtcttttgaggcagatgtgtccatactcatcgacaatattgaggctagtttcggcgtggtcatcaagggagacagtacctcgctcccaagtccaaccgggatgcagggtgtgcatttcgatagttttggcgtaggtatcgggatagtttttgaacctccaggagcggcgattggcttgtctggtcaactccatatcggtgaccctggcagcagtacccaagtgcaccttgatgacgacacattcgcggtggtctgccagctggtagaggaaatgccaaaccccctctacatctcattctacgtcccgcagatgcacttgacagacgttctaacagtcttcaccaatgcccaatgttctttggatgtgccaatattatttactgatctatctttcctgtggtctgagaaccccatggaacctgtggcgctgcccgacggctcgctctctaaactgggctatggcttcagcgcagccgccaacatcttggctttcagcttctacggcgatgtggagattaacctcaccaatggtctgacaggcgacatcgagatggcacccttagcactcggcagcgtattctctatagcaggcgagggcaccggcgtttccatcaaggtggatgccagcggtaatcccatcaaatataatgatttagccacctcggccgcgaggcaacaggcgctgaaaaacgctacgacgaagcaactagtgcccccaagcggtccagtgttgaaaattcagacgatcgcttcccccttcctgcacctcaacggtagtatgagcttatttgacgtgcaaaatatgcaactggatggtgatatcacgtcgaacggaattgagttcgaagtagatgaagcgcattttggcgggctgttgagctcgaatatgaagtgtacattaaccgactatcacaacctggccgcatcgtttctgttcggcatcaatcatcctatttcgctaccctcgataggtggtgtgagtttgggttccattcccttggacgcaacagccagcgcccactttacactaagtacaagctcgtcggatctcgtcctccgagtcggtggcagctttgattttgagggcttgacccgcagtttcggcgacttcacggctgatgcgcacattcaagcagtaagcgatctactatccgccgtcgtcgcctatatcgagcaaaatgccgggttactgtttaacgacctgctgagtacggctggagcgtggacaagtaaggttaagcaggacgtcatcaagggaatcgactcggttgctaccgttttgcgtgatgcttacaaccaagatgccggcgaggtagcctgtactatgagggacgcaggctacggcctcgacgagatagcgaacagcctcaagcaagtctttgatccctcgcaagttgccagcgctcttggaaatgctttcagcctcgcagtacagagtgtcgcgcaagctatgcaacaggctggatatgccggcgaagatgtagctgtcgcactcaaggttgcgtttggtaacgatgctgggcaaatagcttccgccctgcaacgagcatacagctggagtgccgatcaaatccaaggcgttctgggcaagatcggtttcaccgctaatcagataggccaagcctttcaatcactcggcggcgactttgcccaggccggccggtccattctagatgccgctaagaaagctgcagatgccattgagcatgctcttcacctgtccaactag

SEQ ID NO: 40043 - protein, 879 aa, Muscodor strobelii
  misc_feature: SGI Peptide ID NO. 573947
  misc_feature (632)..(876): NCBI GI: 124006413 Blast Desc: M23134_03810 [Microscilla marina ATCC 23134] gi|123988070|gb|EAY27741.1| M23134_03810 [Microscilla marina ATCC 23134]
  misc_feature (544)..(847): NCBI GI: 159901515 Blast Desc: Haur_5003 [Herpetosiphon aurantiacus ATCC 23779] gi|159894554|gb|ABX07633.1| Haur_5003 [Herpetosiphon aurantiacus ATCC 23779]
  misc_feature (287)..(876): NCBI GI: 254421997 Blast Desc: S7335_2147 [Synechococcus sp. PCC 7335] gi|196189486|gb|EDX84450.1| S7335_2147 [Synechococcus sp. PCC 7335]
  misc_feature (723)..(862): NCBI GI: 124006413 Blast Desc: M23134_03810 [Microscilla marina ATCC 23134] gi|123988070|gb|EAY27741.1| M23134_03810 [Microscilla marina ATCC 23134]
  misc_feature (259)..(870): NCBI GI: 228970039 Blast Desc: bthur0004_66540 [Bacillus thuringiensis serovar sotto str. T04001] gi|228789659|gb|EEM37533.1| bthur0004_66540 [Bacillus thuringiensis serovar sotto str. T04001]
  misc_feature (681)..(875): NCBI GI: 186685697 Blast Desc: LamG domain-containing protein [Nostoc punctiforme PCC 73102] gi|186468149|gb|ACC83950.1| LamG domain protein jellyroll fold domain protein [Nostoc punctiforme PCC 73102]
MSANTVSFVNSLDFSVTVYDSFGEQGNTNYFGTLTSLTTVPANTTASVQLSRPVSTLIISNTTTNAPLARRIHLPERSTGPLSVGQADVNAMAQTMAFIAFISSNPNDPLTVAFQSLWRDNSKPQVTPVNQFFVQHTTYASCTFATYMMGITYMAELPTSKGKPLEQALYSLSSLVAQLGGTWPSGFPDIGVTKFTCNTHNDVLAIRADIDLKKLPAQSDEALQFFGSLFQVQVLQVAVTFNYGFSLDVLGTRLSISLDAMQVPFGDSKTLNINKPTVTIDINPLFKFVVFTVAGSIPFNIFEKSFEADVSILIDNIEASFGVVIKGDSTSLPSPTGMQGVHFDSFGVGIGIVFEPPGAAIGLSGQLHIGDPGSSTQVHLDDDTFAVVCQLVEEMPNPLYISFYVPQMHLTDVLTVFTNAQCSLDVPILFTDLSFLWSENPMEPVALPDGSLSKLGYGFSAAANILAFSFYGDVEINLTNGLTGDIEMAPLALGSVFSIAGEGTGVSIKVDASGNPIKYNDLATSAARQQALKNATTKQLVPPSGPVLKIQTIASPFLHLNGSMSLFDVQNMQLDGDITSNGIEFEVDEAHFGGLLSSNMKCTLTDYHNLAASFLFGINHPISLPSIGGVSLGSIPLDATASAHFTLSTSSSDLVLRVGGSFDFEGLTRSFGDFTADAHIQAVSDLLSAVVAYIEQNAGLLFNDLLSTAGAWTSKVKQDVIKGIDSVATVLRDAYNQDAGEVACTMRDAGYGLDEIANSLKQVFDPSQVASALGNAFSLAVQSVAQAMQQAGYAGEDVAVALKVAFGNDAGQIASALQRAYSWSADQIQGVLGKIGFTANQIGQAFQSLGGDFAQAGRSILDAAKKAADAIEHALHLSN

SEQ ID NO: 40044 - DNA, 549 bp, Muscodor strobelii
  misc_feature: SGI EST ID NO. CUFF.96733.0
  misc_feature: Variant of the nucleotide sequence at SEQ ID NO 40042
gcacattcaagcagtaagcgatctactatccgccgtcgtcgcctatatcgagcaaaatgccgggttactgtttaacgacctgctgagtacggctggagcgtggacaagtaaggttaagcaggacgtcatcaagggaatcgactcggttgctaccgttttgcgtgatgcttacaaccaagatgccggcgaggtagcctgtactatgagggacgcaggctacggcctcgacgagatagcgaacagcctcaagcaagtctttgatccctcgcaagttgccagcgctcttggaaatgctttcagcctcgcagtacagagtgtcgcgcaagctatgcaacaggctggatatgccggcgaagatgtagctgtcgcactcaaggttgcgtttggtaacgatgctgggcaaatagcttccgccctgcaacgagcatacagctggagtgccgatcaaatccaaggcgttctgggcaagatcggtttcaccgctaatcagataggccaagcctttcaatcactcggcggcgactttgcccaggccggccggtccattct

SEQ ID NO: 40045 - DNA, 981 bp, Muscodor strobelii
  misc_feature: SGI cDNA ID NO. 573948
  misc_feature: Encodes the peptide sequence at SEQ ID NO 40046
atggtcaacaacttgcatcgaaatctcttggccgttggcctcatggcagattcagcacttgcgcttgggttcactgcctatagcaaaagcgactgcgggacgaagaagaaatgggcctttacggaactacagaatcgtatatctgtagagaagacgactgctgataccatcaaatgcggcgccgtctcatgggacttccccggctggccccagagcgatggcgtgttccacacatgggtagagactggtttcatcgaagatggatgccgactgcaattctatcataacccccctctggaccccaaagaccagaatgcatgctttgtcccaactcaaatcctgaccggtgaggacggctgcgctcaggtcgagctaccttccgagtatggagttgcttactgctgcggtaaaaattgccatggcactgtcccctcgaagagagaggaggaagttcgcgacgtgactgcaatcaaacgcacacctatccttgaccgagcccagcaacaagagaagcgcgatagctgtgacttcaaaaagtcaccaggaagcgtcaaaaacaccatcgggtatcctgtcagggcaagcggcacagtgaactgtccctcagactccaagtttgactgcatgatcagtggagagtactccgtcgatacgaccgtcagccacggcacatcgcaaaccaactctgtctcgggaggtgccggattcttcggcatcagcgctagctacgggcacgattggggtaccactactgagcactcggtcggaagtactatcagctcctccattactctttcggttgcgcctggagactctgggtacgctattttcacccctgagatttcttgtggtaaaggaacattcgtgggcagtggttgcgacgatagtctgaagggcaaagacaagcagtggtgcgttccacgcttgatcgacggctccaaggagcccaagggtcaatggagtgttctgcgcattggatag

SEQ ID NO: 40046 - protein, 326 aa, Muscodor strobelii
  misc_feature: SGI Peptide ID NO. 573948
  misc_feature (68)..(323): NCBI GI: 46112995 Blast Desc: FG02914.1 [Gibberella zeae PH-1]
MVNNLHRNLLAVGLMADSALALGFTAYSKSDCGTKKKWAFTELQNRISVEKTTADTIKCGAVSWDFPGWPQSDGVFHTWVETGFIEDGCRLQFYHNPPLDPKDQNACFVPTQILTGEDGCAQVELPSEYGVAYCCGKNCHGTVPSKREEEVRDVTAIKRTPILDRAQQQEKRDSCDFKKSPGSVKNTIGYPVRASGTVNCPSDSKFDCMISGEYSVDTTVSHGTSQTNSVSGGAGFFGISASYGHDWGTTTEHSVGSTISSSITLSVAPGDSGYAIFTPEISCGKGTFVGSGCDDSLKGKDKQWCVPRLIDGSKEPKGQWSVLRIG

SEQ ID NO: 40047 - DNA, 492 bp, Muscodor strobelii
  misc_feature: SGI cDNA ID NO. 573949
  misc_feature: Encodes the peptide sequence at SEQ ID NO 40048
atgctatcagtcaaattctctgccatccttcttcaggttctcgctcttacagggctatccaatggctgggagttacgattcagcaccgagaatagctgctctgataaatttccccttgtgaagcaacatggccaggcgggcaagagcagcgagtgcaatcagttgactacaggtctcaaatcgcttgttgtccaagattgggacatcaactgccgtcttatgctctggccggagggcagtgtctgcggcacttttgaaaccgctggaccacctcttctcaacctcactctgcaggaggctaaggccaagcataaggtgatcttcgacgctagtacggatcgtgcgtgtttcgagggcaatcttccagatatgtcagaagatgtgctagatgtatcttatagatgcgagcacggtcatcatggaaagggcgggggcaaggatgatagccacggcgggaataacaagcgtcgagcagttgaagtcacgttctga

SEQ ID NO: 40048 - protein, 163 aa, Muscodor strobelii
  misc_feature: SGI Peptide ID NO. 573949
MLSVKFSAILLQVLALTGLSNGWELRFSTENSCSDKFPLVKQHGQAGKSSECNQLTTGLKSLVVQDWDINCRLMLWPEGSVCGTFETAGPPLLNLTLQEAKAKHKVIFDASTDRACFEGNLPDMSEDVLDVSYRCEHGHHGKGGGKDDSHGGNNKRRAVEVTF

SEQ ID NO: 40049 - DNA, 1341 bp, Muscodor strobelii
  misc_feature: SGI cDNA ID NO. 573950
  misc_feature: Encodes the peptide sequence at SEQ ID NO 40050
atggagttctccaagctgccaacagaaattaccgatgacatcatcaccttcgtcgtgattgcacgcgggatgaagcgagcaacccgactgcggcttctcagccgatcgtgggatactgccgtcttggaagccatattctcactcggactactcgacgatatgccgcctgtgtattccctctggtcgcggtatattggatacaaggctttacggatgccacaacgttcgcggtcattgcagatcgtccgtcaagttgccaaatgcttcgtaagccgcggggggcatgatgacaccagccatgaggcactgaacaatcaaattttccggctctgtagaatctttgacatagacccggactacggtctccttagacggagttgttgggttgaaattaccggcacacccacagggaatatcgacaccgaagatgaacagtacacgcaggcctacacgcaggctttacttgcagccgccgcttggagcaatgatatcttgctagtcaagcagattcttccatcatttcaaaactcgttgtacctactctgtcaagatggtgtcacactgcagccatttagttccatatttggcagtcccgtaagccttgccgcttacaggggaaataacgaagtcctgcaactattgatcgaggcaatatctacgagcagccatacgcataaccaacttctctatgaggagatactggtgtacggcagtagaggcaatcagttatccactgtggaacttgcacttcggccagagaatagtgttgcggtatctgttttttccgcagtaaagaccgcaagcagcatcggtatacttcagcggttgttacccttagtaaaaatccaaatacaggatcgaccagaaagactggacccgttgttcattcggatggatcttctcccatcgctgatagtctatgccgccggcaaaggagacattgctatgatagactacattttcagacaaggggctatgttcaaggtgtcatggattcgatctactagcccacgtaaaaatccgattatgaacgcagtacgaaatggccaagaggaatccttgcttttcttgctcgatcgaggcttccagattcgtccaaaggcactcatgagcgcggccgaaagcggtagtatcgaagtcttgaaagtagttctccaacacgttgacgcgaaccatcttgtggtctgtccattgaaaaccgcggtggagagggagcatagcaatgctctaagagtgttgctaagctcagggaagtttacagcggaggcaaaattcaacgcggcccaatatgcacgaactttgggtttggagtcaatggaagagttggtcttaaaccactag

SEQ ID NO: 40050 - protein, 446 aa, Muscodor strobelii
  misc_feature: SGI Peptide ID NO. 573950
  misc_feature (194)..(417): NCBI GI: 159123877 Blast Desc: ankyrin repeat protein [Aspergillus fumigatus A1163]
  misc_feature (14)..(443): NCBI GI: 169594874 Blast Desc: SNOG_00167 [Phaeosphaeria nodorum SN15] gi|111070542|gb|EAT91662.1| SNOG_00167 [Phaeosphaeria nodorum SN15]
  misc_feature (194)..(417): NCBI GI: 70982929 Blast Desc: ankyrin repeat protein [Aspergillus fumigatus Af293] gi|66844617|gb|EAL84954.1| ankyrin repeat protein [Aspergillus fumigatus Af293]
  misc_feature (118)..(443): NCBI GI: 189199064 Blast Desc: conserved [Pyrenophora tritici-repentis Pt-1C-BFP] gi|187982968|gb|EDU48456.1| conserved [Pyrenophora tritici-repentis Pt-1C-BFP]
  misc_feature (197)..(417): NCBI GI: 189502639 Blast Desc: Aasi_1317 [Candidatus Amoebophilus asiaticus 5a2] gi|189498080|gb|ACE06627.1| Aasi_1317 [Candidatus Amoebophilus asiaticus 5a2]
  misc_feature (1)..(387): NCBI GI: 39944936 Blast Desc: [Magnaporthe grisea 70-15] gi|145021527|gb|EDK05656.1| [Magnaporthe grisea 70-15]
  misc_feature (283)..(417): NCBI GI: 158291718 Blast Desc: AGAP003519-PA [Anopheles gambiae str. PEST] gi|157017423|gb|EAL40577.3| AGAP003519-PA [Anopheles gambiae str. PEST]
  misc_feature (261)..(446): NCBI GI: 67517919 Blast Desc: AN1130.2 [Aspergillus nidulans FGSC A4] gi|40747092|gb|EAA66248.1| AN1130.2 [Aspergillus nidulans FGSC A4]
  misc_feature (261)..(446): NCBI GI: 259488555 Blast Desc: TPA: conserved [Aspergillus nidulans FGSC A4]
MEFSKLPTEITDDIITFVVIARGMKRATRLRLLSRSWDTAVLEAIFSLGLLDDMPPVYSLWSRYIGYKALRMPQRSRSLQIVRQVAKCFVSRGGHDDTSHEALNNQIFRLCRIFDIDPDYGLLRRSCWVEITGTPTGNIDTEDEQYTQAYTQALLAAAAWSNDILLVKQILPSFQNSLYLLCQDGVTLQPFSSIFGSPVSLAAYRGNNEVLQLLIEAISTSSHTHNQLLYEEILVYGSRGNQLSTVELALRPENSVAVSVFSAVKTASSIGILQRLLPLVKIQIQDRPERLDPLFIRMDLLPSLIVYAAGKGDIAMIDYIFRQGAMFKVSWIRSTSPRKNPIMNAVRNGQEESLLFLLDRGFQIRPKALMSAAESGSIEVLKVVLQHVDANHLVVCPLKTAVEREHSNALRVLLSSGKFTAEAKFNAAQYARTLGLESMEELVLNH

SEQ ID NO: 40051 - DNA, 972 bp, Muscodor strobelii
  misc_feature: SGI cDNA ID NO. 573951
  misc_feature: Encodes the peptide sequence at SEQ ID NO 40052
atgcgcacttccttgattaaatcggtgtttttgggccttttggccttggaaacggcagccagcgttataccactcaacaacattgctaatactaaaggtctcaattctgtgagacattgtccgcaaaacgtctcccacagcgttcccattgatgatggtaacctcgagcggagaaaggggcctgggaaaggccatggtggctcaggacgacccaaacctaagggtatccgcgaccctgtaaatatccaacgagtgcagcaaaaaggaaaaggtcttcgaaatgatctgcataccgtaatctctaagaaggaaccggacaccggtagcacaaagtcatgcgcaggtaaccctcctggggggctcggttacaatgtcaaaagcctacccaggttgcaagacttgacaacaagtcttgactacggcaaagagttaggcattgatctcggcaagggcgagtggccatccagagctctctggaacaagtctcctgacaatcccgtgcaattgagtgcggccaatgtcgagcaaagaactgtaatttctcagcgggcctttgccgaggctgatgcgactggagctgcaagcaacactcacctcttctacgataatattgagcatctcatgggagacaagaagaatgatcttcactacattgttcgcgatggtatcaataagctgcagacagacgccgagggcggcgaggtgatccttggaaccgtggatgccatcaataaggctttctcggacacacacacagaccctgagcaccagctgaccctgaatcttggcgacgagagccacgaagatatcgtcaatttcatgagtgctcagactcatgtcgccagagttctgcagatgctgaaggattaccacaacaaactgggtaacaaggtgatttccaagctgcacctgttcactgacgagcatgaaggtactgacggcgaacatgccatcattattgagctgtcgtga

SEQ ID NO: 40052 - protein, 323 aa, Muscodor strobelii
  misc_feature: SGI Peptide ID NO. 573951
MRTSLIKSVFLGLLALETAASVIPLNNIANTKGLNSVRHCPQNVSHSVPIDDGNLERRKGPGKGHGGSGRPKPKGIRDPVNIQRVQQKGKGLRNDLHTVISKKEPDTGSTKSCAGNPPGGLGYNVKSLPRLQDLTTSLDYGKELGIDLGKGEWPSRALWNKSPDNPVQLSAANVEQRTVISQRAFAEADATGAASNTHLFYDNIEHLMGDKKNDLHYIVRDGINKLQTDAEGGEVILGTVDAINKAFSDTHTDPEHQLTLNLGDESHEDIVNFMSAQTHVARVLQMLKDYHNKLGNKVISKLHLFTDEHEGTDGEHAIIIELS

SEQ ID NO: 40053 - DNA, 1017 bp, Muscodor strobelii
  misc_feature: SGI cDNA ID NO. 573952
  misc_feature: Reduced expression when VOC is produced
  misc_feature: Encodes the peptide sequence at SEQ ID NO 40054
atgccagccaagaacgccatccctcttgatgtcatccaagagtccaatgcacgcattgcggagctccccgaaggcctcatagctctattcatcggcgcgacaagcgggataggaaagagcacattagaacaattcgcccagtacgcagttcggccaaagatctacgttgttgctcgcagcgctagcaaggtcgccaatcagatgagcgaactccgtagcaggaaccctaaagcggtaatcgacgtcattgagaaggatgtctcactgattagcgatactcaagacgtggtcgactatgtaaagtccaaggagacgaagcttgactttctatacaattcagccggtttcttgcccatgtcaggccgcattgacacgattgagggtctcgagccctctatgacgacccgattctacactaagattcttcctgcacatggcctcatgtccctgctcaacgccgctcagcatccccgggtcgtgagtgtgcttgcgggcggccaggagagcccattagtcgaggatgacttagaccttcagaaacctgggaatttctccctcatcaagtcctctacacagagtgcgacaatgctcacactatgtcttgagcaccttgctgtcgagaaccccaaagtgagctttgtacatagctttcccggccttgtggacacaccccttctaggcaacagctcgaccgggatcaaaaatctcctgcttacctgggtagcaatgccacttgcctctctctttgctatgaagtctcaagaggctggtgctcgagctttgttttatttgaccagtgctcgcttctccgtcaatggcggtggcgtccccgtttcggcccgcatagaagacgcagcgactaacacaattgctcggggcgtattcttactcaacgagaagagtcaaagtgtcggagacgaaaaggtggtggaagaattacgaacgagagggatggataagaaggtttgggaacacacgatggcgacttttaaaagcacgttggcaaaccgaaaatag

SEQ ID NO: 40054 - protein, 338 aa, Muscodor strobelii
  misc_feature: SGI Peptide ID NO. 573952
  misc_feature (22)..(331): NCBI GI: 46139153 Blast Desc: FG11091.1 [Gibberella zeae PH-1]
  misc_feature (7)..(330): NCBI GI: 256723047 Blast Desc: NECHADRAFT_42527 [Nectria haematococca mpVI 77-13-4]
  misc_feature (7)..(335): NCBI GI: 119182114 Blast Desc: CIMG_06107 [Coccidioides immitis RS]
  misc_feature (7)..(334): NCBI GI: 240109163 Blast Desc: short-chain dehydrogenase, [Coccidioides posadasii C735 delta SOWgp]
  misc_feature (7)..(334): NCBI GI: 154290826 Blast Desc: BC1G_15452 [Botryotinia fuckeliana B05.10] gi|150847403|gb|EDN22596.1| BC1G_15452 [Botryotinia fuckeliana B05.10]
  misc_feature (7)..(327): NCBI GI: 238839983 Blast Desc: conserved [Microsporum canis CBS 113480]
  misc_feature (2)..(335): NCBI GI: 115386890 Blast Desc: [Aspergillus terreus NIH2624] gi|114190984|gb|EAU32684.1| [Aspergillus terreus NIH2624]
  misc_feature (12)..(326): NCBI GI: 238844935 Blast Desc: conserved [Microsporum canis CBS 113480]
  misc_feature (7)..(326): NCBI GI: 169779655 Blast Desc: [Aspergillus oryzae RIB40] gi|238500331|ref|XP_002381400.1| short-chain dehydrogenases/reductase, [Aspergillus flavus NRRL3357] protein
  misc_feature (7)..(331): NCBI GI: 238506725 Blast Desc: short-chain dehydrogenases/reductase, [Aspergillus flavus NRRL3357] gi|220689277|gb|EED45628.1| short-chain dehydrogenases/reductase, [Aspergillus flavus NRRL3357]
  misc_feature: Useful for introducing or modulating the production of volatile compounds
MPAKNAIPLDVIQESNARIAELPEGLIALFIGATSGIGKSTLEQFAQYAVRPKIYVVARSASKVANQMSELRSRNPKAVIDVIEKDVSLISDTQDVVDYVKSKETKLDFLYNSAGFLPMSGRIDTIEGLEPSMTTRFYTKILPAHGLMSLLNAAQHPRVVSVLAGGQESPLVEDDLDLQKPGNFSLIKSSTQSATMLTLCLEHLAVENPKVSFVHSFPGLVDTPLLGNSSTGIKNLLLTWVAMPLASLFAMKSQEAGARALFYLTSARFSVNGGGVPVSARIEDAATNTIARGVFLLNEKSQSVGDEKVVEELRTRGMDKKVWEHTMATFKSTLANRK

SEQ ID NO: 40055 - DNA, 1438 bp, Muscodor strobelii
  misc_feature: SGI EST ID NO. CUFF.96751.0
  misc_feature: Variant of the nucleotide sequence at SEQ ID NO 40053
aaagcctcgaaaagttccccgcagatcctgtcaatcgtatcatctgatatcatatcgatactagtattcaagattctacgcatctataaagttgtataagatgttgctgcgagtcccgaaagtgtgcattttatgttcttcatctttagcccactcttgcatctcaagctctctcgcaacttgaaaacatccgccctgaaatagtcgcaccgttcagttcgcattcacgctataccagtattcaatcgtacaatacaaggctataccagtaaatctatctcaccataccaatcagcatcttcaaaacttccaacgcaccagtcaccaaaatgccagccaagaacgccatccctcttgatgtcatccaagagtccaatgcacgcattgcggagctccccgaaggcctcatagctctattcatcggcgcgacaagcgggataggaaagagcacattagaacaattcgcccagtacgcagttcggccaaagatctacgttgttgctcgcagcgctagcaaggtcgccaatcagatgagcgaactccgtagcaggaaccctaaagcggtaatcgacgtcattgagaaggatgtctcactgattagcgatactcaagacgtggtcgactatgtaaagtccaaggagacgaagcttgactttctatacaattcagccggtttcttgcccatgtcaggccgcattgacacgattgagggtctcgagccctctatgacgacccgattctacactaagattcttcctgcacatggcctcatgtccctgctcaacgccgctcagcatccccgggtcgtgagtgtgcttgcgggcggccaggagagcccattagtcgaggatgacttagaccttcagaaacctgggaatttctccctcatcaagtcctctacacagagtgcgacaatgctcacactatgtcttgagcaccttgctgtcgagaaccccaaagtgagctttgtacatagctttcccggccttgtggacacaccccttctaggcaacagctcgaccgggatcaaaaatctcctgcttacctgggtagcaatgccacttgcctctctctttgctatgaagtctcaagaggctggtgctcgagctttgttttatttgaccagtgctcgcttctccgtcaatggcggtggcgtccccgtttcggcccgcatagaagacgcagcgactaacacaattgctcggggcgtattcttactcaacgagaagagtcaaagtgtcggagacgaaaaggtggtggaagaattacgaacgagagggatggataagaaggtttgggaacacacgatggcgacttttaaaagcacgttggcaaaccgaaaatagttgacgataggaatgaatggcatgattctaaagatatgaagtagaagacttaaaggaagaaagcatattaatattaataccatacactgcac

SEQ ID NO: 40056 - DNA, 918 bp, Muscodor strobelii
  misc_feature: SGI cDNA ID NO. 573953
  misc_feature: Encodes the peptide sequence at SEQ ID NO 40057
atggatgccatcgttcaaccaagcgccctgaactccgatcagttcttaggcctcacggttacgtttggtgcctttacgactgcaatcgtcggtatacgactatcctccaactttattgctgtcaaaaagctccatgtggaagattacttttgtgttgtggccttcgtcttcgtggtcttgaacatcctagtgtcgtatatgctagtcgaagcactcaacgccgatccaagcgaggttagcgagaggtactttgcaactcttggcgcaatcgcaatcttctcggcgggtagcgcagtgtacacggcaaaactgcccctactattgctgttcattcgtatctttggagttaaagactggttacggcggtcatgcaaggtgcttgtcttagccagcgtgctaggcttcgtcgggtcggctacatacactagtgttcaatgcagcccggacctccacgtgcatgacatgcggctggtgttgtcgtgcgtcactgcccttacccgcggctgcatcgcacgatgcactctgtcgctcgtgatcgatatcatcatgttcgtacttccacttcccgttgtcaaaaatcttcagcttccgctgcgccggaagattggactcgctgtggtgttcatgacaggtctcctgattctagagagctgcgtcgttctcctggtcagctgcactgcttcgcttcatcaactgtgggccaagatcgcagcatatcgacgcactcgactgagccgtctaggctcgagtatcaagagcacatggtccggaagctcgacacgccacactcccaagcttgacgacttggatgacccttctagttctggcgtccatatcaagcatcaatacgtccggctctctgaagtctctgttcctaaagacgttgtggcgcgtgaagcccgagaatcatgtgtataa

SEQ ID NO: 40057 - protein, 305 aa, Muscodor strobelii
  misc_feature: SGI Peptide ID NO. 573953
  misc_feature (4)..(222): NCBI GI: 238840889 Blast Desc: conserved [Microsporum canis CBS 113480]
  misc_feature (12)..(236): NCBI GI: 239607364 Blast Desc: integral membrane protein [Ajellomyces dermatitidis ER-3]
  misc_feature (6)..(214): NCBI GI: 261200579 Blast Desc: integral membrane protein [Ajellomyces dermatitidis SLH14081] gi|239593762|gb|EEQ76343.1| integral membrane protein [Ajellomyces dermatitidis SLH14081]
  misc_feature (18)..(238): NCBI GI: 242771494 Blast Desc: plasma membrane protein Pth11-like, [Talaromyces stipitatus ATCC 10500] gi|218721473|gb|EED20891.1| plasma membrane protein Pth11-like, [Talaromyces stipitatus ATCC 10500]
  misc_feature (16)..(224): NCBI GI: 259487289 Blast Desc: TPA: integral membrane protein, (AFU_orthologue; AFUA_6G07820) [Aspergillus nidulans FGSC A4]
  misc_feature (16)..(224): NCBI GI: 67522947 Blast Desc: AN1930.2 [Aspergillus nidulans FGSC A4] gi|40745939|gb|EAA65095.1| AN1930.2 [Aspergillus nidulans FGSC A4]
  misc_feature (28)..(238): NCBI GI: 238841340 Blast Desc: integral membrane protein [Microsporum canis CBS 113480]
  misc_feature (18)..(230): NCBI GI: 169619517 Blast Desc: SNOG_12957 [Phaeosphaeria nodorum SN15] gi|111058637|gb|EAT79757.1| SNOG_12957 [Phaeosphaeria nodorum SN15]
  misc_feature (5)..(223): NCBI GI: 242766624 Blast Desc: conserved [Talaromyces stipitatus ATCC 10500] gi|218724404|gb|EED23821.1| conserved [Talaromyces stipitatus ATCC 10500]
  misc_feature (24)..(289): NCBI GI: 115398095 Blast Desc: conserved [Aspergillus terreus NIH2624] gi|114192830|gb|EAU34530.1| conserved [Aspergillus terreus NIH2624]
MDAIVQPSALNSDQFLGLTVTFGAFTTAIVGIRLSSNFIAVKKLHVEDYFCVVAFVFVVLNILVSYMLVEALNADPSEVSERYFATLGAIAIFSAGSAVYTAKLPLLLLFIRIFGVKDWLRRSCKVLVLASVLGFVGSATYTSVQCSPDLHVHDMRLVLSCVTALTRGCIARCTLSLVIDIIMFVLPLPVVKNLQLPLRRKIGLAVVFMTGLLILESCVVLLVSCTASLHQLWAKIAAYRRTRLSRLGSSIKSTWSGSSTRHTPKLDDLDDPSSSGVHIKHQYVRLSEVSVPKDVVAREARESCV

SEQ ID NO: 40058 - DNA, 1316 bp, Muscodor strobelii
  misc_feature: SGI EST ID NO. CUFF.96758.0
  misc_feature: Variant of the nucleotide sequence at SEQ ID NO 40056
tttgtgttgtggccttcgtcttcgtggtcttgaacatcctagtgtcgtatatgctagtcgaagcactcaacgccgatccaagcgaggttagcgagaggtactttgcaactcttggcgcaatcgcaatcttctcggcgggtagcgcagtgtacacggcaaaactgcccctactattgctgttcattcgtatctttggagttaaagactggttacggcggtcatgcaaggtgcttgtcttagccagcgtgctaggcttcgtcgggtcggctacatacactagtgttcaatgcagcccggacctccacgtgcatgacatgcggctggtgttgtcgtgcgtcactgcccttacccgcggctgcatcgcacgatgcactctgtcgctcgtgatcgatatcatcatgttcgtacttccacttcccgttgtcaaaaatcttcagcttccgctgcgccggaagattggactcgctgtggtgttcatgacaggtctcctgtgagtacttatcccacgacattgcgctcccgcgctatgtgcggtgcttcagcttactagagctcggtttgaaaccaaagcgctatcattgccagcgccatgggactttattatcagactatgcaatccgcctactcctccacgaactttgtcaatgctttgctagctacgattctagagagctgcgtcgttctcctggtcagctgcactgcttcgcttcatcaactgtgggccaagatcgcagcatatcgacgcactcgactgagccgtctaggctcgagtatcaagagcacatggtccggaagctcgacacgccacactcccaagcttgacgacttggatgacccttctagttctggcgtccatatcaagcatcaatacgtccggctctctgaagtctctgttcctaaagacgttgtggcgcgtgaagcccgagaatcatgtgtataagacgccaggctgacatgtcagagaatcttcgtcagaatctgactaaagggtctgaaactgagattggcgaagatggttatcaattcctttgtattgatagatgtgttacgtaccatgacggcacgctaacgctagacattatttcgcgtaagaagacagattgtagtcacctgagcgggtggcgatccgactaagcgattggagggctaactcgacgaggatgaggaccaaagagccggttgtaagacataaagtgtctactatcaaatgagcaaaccccacgaagaacatctggcatgatggatggcttcgagagattaatagagaaggttggacttgtatacatagattagcaacattatctaagcaactagag

SEQ ID NO: 40059 - DNA, 1113 bp, Muscodor strobelii
  misc_feature: SGI cDNA ID NO. 573954
  misc_feature: Encodes the peptide sequence at SEQ ID NO 40060
atgttgacctgcactcgcgtagctggatttctcatcaccctgggggccaccgtgctcccctttgtttccgcagactgtccagatcttcccggatgtgactctttagggccaccgccgcttaacagcaacggaggtttggatcctaaagatcccaacgcgctgggtgtctacgcgttgaactgcccatgctactccggcgaggtcttggactgtactgtgacctacactggcatcaatcaacaagtgactgtggaagccactagaactaccgtttcttatggcaacatccagactactatcacctacagcttcacaggggctgccacctcgatacaatctggcagtcccatcagtatcctgtttggtgctcggggtgctcactacccatatgtctcacagatctatagcccagtaccatctatcttctacgtagatgctactacaaccgagaccgagactgacactgcaacgacgacaaccacctcaactgaaacgacaaccacaacgtccatcattgctcagcagacaacaacctctgcttgcacaactggtactgtgacgaagaccgcaaaggcgtcaaccaccacaagtgtgtccaccatcacgccgccgccaaagactgtcacaaagacgaaagttgttgacaccactgtgcgctcgagttgtgttgctcagactcagagggcaacgcgccaagaacgacgggacgagttggacgctcgccaggctccattcgttgcggaaacactttggttccccgacgcctatggccagcctcagtacacatacgagacaactgctactcagacggagtcagctaccaccacgtccactgagacggtcacagcgacgacgactgagacaagcactaccgctgtcgcaccgacaccgctggttacaacggtatgcagcaatgtggcggctactatcaccactacaccaacagtcacagcaacacggaagaccacgttgaaggctagaaccaccactaccacccgcaccgtttatcacacctgcacggtatacccgcataatccaccaccgatttgcacaagtcgcccaaagaagcgtgagcaacaagtagagactgagttccttttcctggaagactag

SEQ ID NO: 40060 - protein, 370 aa, Muscodor strobelii
  misc_feature: SGI Peptide ID NO. 573954
MLTCTRVAGFLITLGATVLPFVSADCPDLPGCDSLGPPPLNSNGGLDPKDPNALGVYALNCPCYSGEVLDCTVTYTGINQQVTVEATRTTVSYGNIQTTITYSFTGAATSIQSGSPISILFGARGAHYPYVSQIYSPVPSIFYVDATTTETETDTATTTTTSTETTTTTSIIAQQTTTSACTTGTVTKTAKASTTTSVSTITPPPKTVTKTKVVDTTVRSSCVAQTQRATRQERRDELDARQAPFVAETLWFPDAYGQPQYTYETTATQTESATTTSTETVTATTTETSTTAVAPTPLVTTVCSNVAATITTTPTVTATRKTTLKARTTTTTRTVYHTCTVYPHNPPPICTSRPKKREQQVETEFLFLED

SEQ ID NO: 40061 - DNA, 1710 bp, Muscodor strobelii
  misc_feature: SGI EST ID NO. CUFF.96770.0
  misc_feature: Variant of the nucleotide sequence at SEQ ID NO 40059
cgccggatggcttacgtatgcgacggatccgaagttgaactatcagtgcaatctagaatttttgacttatggactaattgagattcttagtcagggcgcaaaacacgctatcgaggaagtcgttaggaggcctggagtctagacctcagccgcacacgttttgctgtctaggcgccgatagcttgggctagtacatcatagtggatttgacttttctgcattcgacgacaaccccaaagaccggaatctggatggctctacaagaaccaatagaccacaatggccgtccgcaaatttcttgcaggttcaatgcgaaaagattgggggcagtgtggccgatatataagaatgtagtggcagtctacgaggcgagcgaaatctcgcttcagcttgttcggcaaaaaccctctgtttcgcgatcatcatgttgacctgcactcgcgtagctggatttctcatcaccctgggggccaccgtgctcccctttgtttccgcagactgtccagatcttcccggatgtgactctttagggccaccgccgcttaacagcaacggaggtttggatcctaaagatcccaacgcgctgggtgtctacgcgttgaactgcccatgctactccggcgaggtcttggactgtactgtgacctacactggcatcaatcaacaagtgactgtggaagccactagaactaccgtttcttatggcaacatccagactactatcacctacagcttcacaggggctgccacctcgatacaatctggcagtcccatcagtatcctgtttggtgctcggggtgctcactacccatatgtctcacagatctatagcccagtaccatctatcttctacgtagatgctactacaaccgagaccgagactgacactgcaacgacgacaaccacctcaactgaaacgacaaccacaacgtccatcattgctcagcagacaacaacctctgcttgcacaactggtactgtgacgaagaccgcaaaggcgtcaaccaccacaagtgtgtccaccatcacgccgccgccaaagactgtcacaaagacgaaagttgttgacaccactgtgcgctcgagttgtgttgctcagactcagagggcaacgcgccaagaacgacgggacgagttggacgctcgccaggctccattcgttgcggaaacactttggttccccgacgcctatggccagcctcagtacacatacgagacaactgctactcagacggagtcagctaccaccacgtccactgagacggtcacagcgacgacgactgagacaagcactaccgctgtcgcaccgacaccgctggttacaacggtatgcagcaatgtggcggctactatcaccactacaccaacagtcacagcaacacggaagaccacgttgaaggctagaaccaccactaccacccgcaccgtttatcacacctgcacggtatacccgcataatccaccaccgatttgcacaagtcgcccaaagaagcgtgagcaacaagtagagactgagttccttttcctggaagactagacacatgctttatgtgatgcgcaggtcggctactgtccatactgttgatacaaggtgcgaaccggggcccaacccctttacgcctcagtgattgagggagcatatatcgcatttgataggttgcagtatgaattaactatattaatgtagtaatattaataacccgctacccc

SEQ ID NO: 40062 - DNA, 1539 bp, Muscodor strobelii
  misc_feature: SGI cDNA ID NO. 573955
  misc_feature: Encodes the peptide sequence at SEQ ID NO 40063
atgcagtcttcatacatctccgaggctccgagtcgcctgactgtcggacaagcagccctagccgtaacggctctgttcctgtcctggtacatcatcagcgccgttgcagcatggtacaagctccgacatattccgggccccctcgtggcctccttttcggacatgtggcttgtccgggcggcgttcagcgggcacatggacgaggtgctccatgagaagcaaaacaagtacggcgaggtgatgcgtatcgggccgcgggccattgccatatacgacccagataccctctggcgcatcaacagcgcgcgctcaatgtacgccaaaagcgaatggtataagacggtcaagctcgactcgcgcggtcacagcagcttttcggagcccgacacggccaagcatgacaagcgcaaggcgaagctggccgcgggctatgcaatgggcgggtcacggaacttggaagccaaggttgatacctggattggggcgctcgtggaccgcattaaggataagatcacgcgtggagaaggtgttatggacatcgggaggatgatgcaatactttcaaatcgatttgattaccgaggctgggcttggtgcgccctggggtgccctcgcggacgagcgggatcacttcgattatcttaagatgacggagacgttcctacccgtcgttcagaccgtggggtactggccactgctgcgctcactcttttgttcggattggttcatgcgctttgctggacctaagactactgataaagcagggctcggtctgtttcttggcctcctggagaaagaggttaagagccgcacagatggctcgaaggagaaggccggcgatggtagcgtcgatatgcttggtgaatggctgcgcaacggaatgtctgagacggatgtccagttagatcttgccctgcagatccccgccgggacagacacgtcagtgacagtgataaggggcctgctattgctcctcatatcttcgcccatagtctaccggcgactgaagcaggagattcgggacgccatcactgaaggtcgcctttcggactctatcacaaacgaggaggctaggaacctcccatatttgcaggccatagttcgagagggcatgcgactgatccccccggtagcagccggtctcccgaaagtcgtaccaccgcctggagacacgatatgcggcaagtttatgcctgcgggtaccgaggtatacccaaacttcgcctgtctgctgcgcaatcccgaggtgttcggcaaagacgtgaacatcttccggcccgagcgcttcctctccgaaagcggtgatgacccggaagtgatcgcgcgcaggtttaagacggtcgacttcatttttggaggcgggcgctggatgtgcttgggcaaaagccttgcgcaaactgagcttaataagatctttgtgcagttgctcaggaatttcgacttccagattgccaaccccgagaggccatggacgcgggttgcatacctaagtatactaatcagtgacttttgggtactcgcgacggaggcaaagcagtaa

SEQ ID NO: 40063 - protein, 512 aa, Muscodor strobelii
  misc_feature: SGI Peptide ID NO. 573955
  misc_feature (45)..(507): Pfam Id: PF00067 Pfam Desc: Cytochrome P450
  misc_feature (309)..(491): Pfam Id: PF00067 Pfam Desc: Cytochrome P450
  misc_feature (6)..(511): NCBI GI: 85091832 Blast Desc: NCU09185 [Neurospora crassa OR74A] gi|28920493|gb|EAA29859.1| [Neurospora crassa OR74A]
  misc_feature (21)..(505): NCBI GI: 169615603 Blast Desc: SNOG_10960 [Phaeosphaeria nodorum SN15] gi|111060339|gb|EAT81459.1| SNOG_10960 [Phaeosphaeria nodorum SN15]
  misc_feature (10)..(509): NCBI GI: 85111238 Blast Desc: NCU08112 [Neurospora crassa OR74A] gi|28925582|gb|EAA34606.1| [Neurospora crassa OR74A]
  misc_feature (6)..(506): NCBI GI: 256723424 Blast Desc: NECHADRAFT_80996 [Nectria haematococca mpVI 77-13-4]
  misc_feature (35)..(512): NCBI GI: 171678209 Blast Desc: protein product [Podospora anserina] gi|170937174|emb|CAP61831.1| protein product [Podospora anserina]
  misc_feature (1)..(508): NCBI GI: 170940118 Blast Desc: protein product [Podospora anserina]
  misc_feature (14)..(495): NCBI GI: 46109770 Blast Desc: FG01767.1 [Gibberella zeae PH-1]
  misc_feature (13)..(509): NCBI GI: 85094228 Blast Desc: NCU05848 [Neurospora crassa OR74A] gi|28921295|gb|EAA30603.1| [Neurospora crassa OR74A]
  misc_feature (23)..(505): NCBI GI: 261357872 Blast Desc: pisatin demethylase [Verticillium albo-atrum VaMs.102]
  misc_feature (21)..(476): NCBI GI: 46139967 Blast Desc: FG11498.1 [Gibberella zeae PH-1]
  misc_feature (41)..(496): SWISSPROT Homolog: EC 1.14.13.12 Benzoate 4-monooxygenase
MQSSYISEAPSRLTVGQAALAVTALFLSWYIISAVAAWYKLRHIPGPLVASFSDMWLVRAAFSGHMDEVLHEKQNKYGEVMRIGPRAIAIYDPDTLWRINSARSMYAKSEWYKTVKLDSRGHSSFSEPDTAKHDKRKAKLAAGYAMGGSRNLEAKVDTWIGALVDRIKDKITRGEGVMDIGRMMQYFQIDLITEAGLGAPWGALADERDHFDYLKMTETFLPVVQTVGYWPLLRSLFCSDWFMRFAGPKTTDKAGLGLFLGLLEKEVKSRTDGSKEKAGDGSVDMLGEWLRNGMSETDVQLDLALQIPAGTDTSVTVIRGLLLLLISSPIVYRRLKQEIRDAITEGRLSDSITNEEARNLPYLQAIVREGMRLIPPVAAGLPKVVPPPGDTICGKFMPAGTEVYPNFACLLRNPEVFGKDVNIFRPERFLSESGDDPEVIARRFKTVDFIFGGGRWMCLGKSLAQTELNKIFVQLLRNFDFQIANPERPWTRVAYLSILISDFWVLATEAKQ

SEQ ID NO: 40064 - DNA, 160 bp, Muscodor strobelii
  misc_feature: SGI EST ID NO. CUFF.96778.0
  misc_feature: Variant of the nucleotide sequence at SEQ ID NO 40062
agccttgcgcaaactgagcttaataagatctttgtgcagttgctcaggaatttcgacttccagattgccaaccccgagaggccatggacgcgggttgcatacctaagtatactaatcagtgacttttgggtactcgcgacggaggcaaagcagtaattag

SEQ ID NO: 40065 - DNA, 1062 bp, Muscodor strobelii
  misc_feature: SGI cDNA ID NO. 573956
  misc_feature: Encodes the peptide sequence at SEQ ID NO 40066
atgaccgataatactctcacagtgccaaaatcgtcaaaggctgcaatccaaaatcctgacacaaaagtgatcactgtccagcagcgcccgacaccagtaccccaagccacacaagttcttgtgaagattcactattcgggcgtttgcgctacagacttgcacctagcgcgtcgcaccgtcccatacttgcaacccactgtcgctattggaggtcacgaggggaccggtattatcgcgcaactaggctcggaagttgatgcctctctctggcatgttggtgatcgcgtagccgtccgatgggtgcacattgtctgtgggaaatgcgaggtttgcaccactggttacgagaatttgtgctctgagcgaaagctggcgggcaaagatgtcgagggtacattcgccgagtacgcaattgccgatagcgcttacatggtgaggctgcctgatgaagtgtctgatgcttacgctgcgccgattctctgcgcgggcgtcacggtatacaaagcactcaagatcgcagatctccggaaaggctcttgggttgcgattgcgggagctggaggcggacttggtcacttggcaatccagtatgcgtcagctttgggattgaaagttgttgccttggatgcgaacaaggaagaactctgtttgcgtctgggtgcagcagtgtatatcgatgttggtctggctcaggatgctgttgctgacgtgattagagcgacggacggtggtgcacacggcgcacttatttgcgcatcctcagctcaggcatatgtagatgcgctgaagtttcttcgtcgcgcaggaacactggtctgcatcggcctacctcaaaagacaatgcagttaccagttggaccccaagactttgttgcaaggggaattcgtttggtcgggacttccacaggggaccgcgaagacacgattgaggcattggagctcgttagacagggaaaggtagtaccgcagctcgtggagaaaaagcttgaagacatcgagggcatcttgtccgatattgaaaatggtaaggtccacggcaaggccattgttaagatgacctga

SEQ ID NO: 40066 - protein, 353 aa, Muscodor strobelii
  misc_feature: SGI Peptide ID NO. 573956
  misc_feature (36)..(147): Pfam Id: PF08240 Pfam Desc: Alcohol dehydrogenase GroES-like domain
  misc_feature (177)..(317): Pfam Id: PF00107 Pfam Desc: Zinc-binding dehydrogenase
  misc_feature (14)..(353): SWISSPROT Homolog: EC 1.1.1.1 Alcohol dehydrogenase
MTDNTLTVPKSSKAAIQNPDTKVITVQQRPTPVPQATQVLVKIHYSGVCATDLHLARRTVPYLQPTVAIGGHEGTGIIAQLGSEVDASLWHVGDRVAVRWVHIVCGKCEVCTTGYENLCSERKLAGKDVEGTFAEYAIADSAYMVRLPDEVSDAYAAPILCAGVTVYKALKIADLRKGSWVAIAGAGGGLGHLAIQYASALGLKVVALDANKEELCLRLGAAVYIDVGLAQDAVADVIRATDGGAHGALICASSAQAYVDALKFLRRAGTLVCIGLPQKTMQLPVGPQDFVARGIRLVGTSTGDREDTIEALELVRQGKVVPQLVEKKLEDIEGILSDIENGKVHGKAIVKMT

SEQ ID NO: 40067 - DNA, 603 bp, Muscodor strobelii
  misc_feature: SGI EST ID NO. CUFF.96793.0
  misc_feature: Variant of the nucleotide sequence at SEQ ID NO 40065
aagcactcaagatcgcagatctccggaaaggctcttgggttgcgattgcgggagctggaggcggacttggtcacttggcaatccagtatgcgtcagctttgggattgaaagttgttgccttggatgcgaacaaggaagaactctgtttgcgtctgggtgcagcagtgtatatcgatgttggtctggctcaggatgctgttgctgacgtgattagagcgacggacggtggtgcacacggcgcacttatttgcgcatcctcagctcaggcatatgtagatgcgctgaagtttcttcgtcgcgcaggaacactggtctgcatcggcctacctcaaaagacaatgcagttaccagttggaccccaagactttgttgcaaggggaattcgtttggtcgggacttccacaggggaccgcgaagacacgattgaggcattggagctcgttagacagggaaaggtagtaccgcagctcgtggagaaaaagcttgaagacatcgagggcatcttgtccgatattgaaaatggtaaggtccacggcaaggccattgttaagatgacctgaaaaagttacgacgatatgatcacaatcaactttctcgtcaaag

SEQ ID NO: 40068 - DNA, 1509 bp, Muscodor strobelii
  misc_feature: SGI cDNA ID NO. 573957
  misc_feature: Encodes the peptide sequence at SEQ ID NO 40069
atggcttcgacaaccgagaaaggactttctgagcacgaagagcccatcagccccgagagtctaaagacgcgcgatggcatcgtgctcatgccgcaaccttccgacgaccccaatgacccgctgaattggtcatggtttcgcaagcatgctgccatgttcactatctcctacctcgcgcttgtgtgctatgtcgcagtcaccagtctcgttgcagctacggttcctcttgccaaaacactggaagtacccaaatcccaagcggtctatctcggtagcacaccagttgccctttatgccgttgcgccatggctttggagtccattgagtcacgtgttgggtcgacggccagtactcctcctgtccaatgtgattgcgattgtcggcgtcgcagtcgctggaacagcaaccacatacggtgcctgcatcgttggacggatcattcttggcacgggcggatcagccttttggacactaggtccagctagtattggagatattttctttcgccatgaaagaggcaagaagatcggcatatcaactctcgcgattgtcgtgtcacctttcctgggcacaatcatcggcggctccatcagccaacatctcggatggcgtgcaactcagtggataccactcatcttcattgcttttgggcttgtattgcagattttcttattaccggagacaatatatattcgagacacgcttgctcagccgagcgcatttggcagctcaacgaaaattgaggcgacatcgcgcaccaagagttccctatgggctcgatacggaatacgaatcccaaagcgcagtaatgatacgaatcacagcttcctcttcactgcgacccgtccgtttatattgttcaagttcccagccgtcttgctctcgtccttttggtttggaattgcatattggatgcatgtaggcatcactgcagaaattcccatcgtttatgaagcgcaatacggcttttcccagctcggtatcggcttgaccggcttctccgggttaatcggggctctgataggcgaggcgtacgctggtccatcgcttgacttcattgcgaaacgggcactgaaacaggatattgaatggcagcccgagcgccgtcttacagctatctggcccgctttagtggcagtaccagccgggcttattctttttgggactgcaatacaattcgacgcagcgtggattgtccccttaatagggcaagctttgtacatcttcggtatcgagatcggcacgactgttatacaaacttacatatttgaatgctatcctcgtcaaggggcggaagtcagcctggtgttcaatttgtttcgtaatctcctgtcctatactgccccgttcttcacgcaaccggggataaattcactcggcttcgcggcgccctatggtcttttcggtggctttaccgcagtgttctttcccttcaccattggggtgctcatgtggaaaggcaaagcgattcgcgacaagagtggcgatcccggttggagtcgagattaa

SEQ ID NO: 40069 - protein, 502 aa, Muscodor strobelii
  misc_feature: SGI Peptide ID NO. 573957
  misc_feature (56)..(449): Pfam Id: PF07690 Pfam Desc: Major Facilitator Superfamily
MASTTEKGLSEHEEPISPESLKTRDGIVLMPQPSDDPNDPLNWSWFRKHAAMFTISYLALVCYVAVTSLVAATVPLAKTLEVPKSQAVYLGSTPVALYAVAPWLWSPLSHVLGRRPVLLLSNVIAIVGVAVAGTATTYGACIVGRIILGTGGSAFWTLGPASIGDIFFRHERGKKIGISTLAIVVSPFLGTIIGGSISQHLGWRATQWIPLIFIAFGLVLQIFLLPETIYIRDTLAQPSAFGSSTKIEATSRTKSSLWARYGIRIPKRSNDTNHSFLFTATRPFILFKFPAVLLSSFWFGIAYWMHVGITAEIPIVYEAQYGFSQLGIGLTGFSGLIGALIGEAYAGPSLDFIAKRALKQDIEWQPERRLTAIWPALVAVPAGLILFGTAIQFDAAWIVPLIGQALYIFGIEIGTTVIQTYIFECYPRQGAEVSLVFNLFRNLLSYTAPFFTQPGINSLGFAAPYGLFGGFTAVFFPFTIGVLMWKGKAIRDKSGDPGWSRD

SEQ ID NO: 40070 - DNA, 2127 bp, Muscodor strobelii
  misc_feature: SGI EST ID NO. CUFF.96853.0
  misc_feature: Variant of the nucleotide sequence at SEQ ID NO 40068
cccggtctcaatttgatctttttctggccgagctaaagtgaggcaatcttctccaatgtgcacccgagggtgcaccttatttcctctgtcaattctgtagcgattcagtttgatccgttaaaaacctttagtttcactcgcgatccacttcgtcacacgccgtcagaaaacaccgacgtgtagatggcagaaaaaggtccatatcgtgccgcatttcacgactaaacaggcaccaagagggatacttagcgcgcttccccggtttcctgtgcggaagggtcaaacactgggctgcgggacttggggccagtggagctcgggaacgaagagtctaatcatctcccgcgatccggtttctaggcaagaaggcactctatcgagcgcaaagatggcttcgacaaccgagaaaggactttctgagcacgaagagcccatcagccccgagagtctaaagacgcgcgatggcatcgtgctcatgccgcaaccttccgacgaccccaatgacccgctgaattggtcatggtttcgcaagcatgctgccatgttcactatctcctacctcgcgcttgtgtgctatgtcgcagtcaccagtctcgttgcagctacggttcctcttgccaaaacactggaagtacccaaatcccaagcggtctatctcggtagcacaccagttgccctttatgccgttgcgccatggctttggagtccattgagtcacgtgttgggtcgacggccagtactcctcctgtccaatgtgattgcgattgtcggcgtcgcagtcgctggaacagcaaccacatacggtgcctgcatcgttggacggatcattcttggcacgggcggatcagccttttggacactaggtccagctagtattggagatattgtgcgatgcaggtcttttttgaatgttacaagtacgaggtactgactcttatctagttctttcgccatgaaagaggcaagaagatcggcatatcaactctcgcgattgtcgtgtcacctttcctgggcacaatcatcggcggctccatcagccaacatctcggatggcgtgcaactcagtggataccactcatcttcattgcttttgggcttgtattgcagattttcttattaccggagacaatatatattcgagacacgcttgctcagccgagcgcatttggcagctcaacgaaaattgaggcgacatcgcgcaccaagagttccctatgggctcgatacggaatacgaatcccaaagcgcagtaatgatacgaatcacagcttcctcttcactgcgacccgtccgtttatattgttcaagttcccagccgtcttgctctcgtccttttggtttggaattgcatattggatgcatgtaggcatcactgcagaaattcccatcgtttatgaagcgcaatacggcttttcccagctcggtatcggcttgaccggcttctccgggttaatcggggctctgataggcgaggcgtacgctggtccatcgcttgacttcattgcgaaacgggcactgaaacaggatattgaatggcagcccgagcgccgtcttacagctatctggcccgctttagtggcagtaccagccgggcttattctttttgggactgcaatacaattcgacgcagcgtggattgtccccttaatagggcaagctttgtacatcttcggtatcgagatcggcacgactgttatacaaacttacatatttgaatgctatcctcgtcaaggggcggaagtcagcctggtgttcaatttgtttcgtaatctcctgtcctatactgccccgttcttcacgcaaccggggataaattcactcggcttcgcggcgccctatggtcttttcggtggctttaccgcagtgttctttcccttcaccattggggtgctcatgtggaaaggcaaagcgattcgcgacaagagtggcgatcccggttggagtcgagattaacatgataggttcaagatttctgagcatatgtgttgtttgttgtgcagcaactaggcagtacgtgagttaggagcaaggcgaaactccgtctttgacacacgacacgacgtacggacgctcgagggtgatacataagtaatagtgtatatattgatacttacataatcgatgtcg

SEQ ID NO: 40071 - DNA, 1935 bp, Muscodor strobelii
  misc_feature: SGI cDNA ID NO. 573958
  misc_feature: Encodes the peptide sequence at SEQ ID NO 40072
atggataaatcacaacgtcgtgatgcacctatcgtgcaatatctcaaggagaacaaggacattcccggtgacacctccatgcccgaaaactatcagctcacgttagagaaggaattcacccgtatattcaatgatcaagaccttaaacagatcgaagactctcgcatcgaccaagtacagtcatcattagcagagctcttcgagcacggcattccaaaggctcaggaacaaggcaccgtggagattgagacagagcaagatctggtcatcgtcctcagcatttgcggattcaaggttcgtgtttggcagctaaaagatgttgattatcgtgacaagaaatcgtacgatcaagcggcaagagccaagtctgtcgagcaggcttccaagcgcaagatgacgcaaatcgaaccgaaaatgggtcggcatgtcgaaaatttcctcatggcccagagtatccagttaggacaggcacctcctatgacgatgtttctcgttacaaagaagaatcctcagccctctgagaatcggaagaaatggtacaaagaattacgaaccgaggcctgtcgtcgtttctgggtgaagacgacaaggcaacagagagaccagtggagatctatggcagatgctccaccgcatgaactctcacagttgatcgagcaaatcaaaactgaagaccgaagccgcactgcagacagcttttggacgtatcaacgagacgaggaagctgtcaccgattcaagcatctataagacgtgggatgaagatattgtgatcgtgtttgataagcactgtgagcctcttctgtgtcgattcaaaggcctgtttcgattcctttacgggaactccatgaacaaggttgatcatgcaatccgcacgtggtcaaagatgccaccactccccattcccgcaacatccagacatgcggtagacgattttattcgtcaaaaacatccggagcaaaaccttgagaaagcagagtcagtcgaggagatctaccaacgccatcaatgcgtagttcactacggaacatgggcccaaaagggacacgagaatcctgaccatattttcaagactcccgacacactcttccacagagcaacaaccgaacgagcgtgcttcatgttagtcgataaagggtttccaacattccgtgaaaaggtccttggacttgggtctgaggtcgtgcgttatttattccaaataatggcaccggaagaatacgaggagtgttgcaaagtgtataaggcattacccgaagacactcgaatgaagatatctgagcctacttttgcgacacttgcggtgcttggcataaacacgttcacgcaacggcataacgacaaaactgatgtcaaacttgggtttgctggtcttgttgccctgggcgactatacaggtgggggtggcgacatatgctttccgcagcttgggctcaagatgccctataaggctggagactgcgtgatatttcgaggcgctgagatggaacattttgtgtccgactggaccggttatcgaatcttcctccttttcactaatcaccagcctgtacgtcgatgggcgcatcggaagatgggcaaactgcccccaaagtggaatgacgactggcatccagatgaagttgaggcacagaaagagggattgaggcgcgcttataagacggaaacaacaacaaacaccaagactgggcgctatagcccatgtcatatgtctctgttgacacccgactccgagtcgctcacgaaggatgagaaatggggaccaatgttagaggaatcctcggacgagcaatcgactgtgagcaatgaagatagcgcgaagcccagcaagatacctatcggagaggaggtctcgagcaggcgcacaaagggcgaagatgtagggaaagatgagtatgtcgctgagaaatttgctcgctgggcggcaagttcgtga

SEQ ID NO: 40072 - protein, 644 aa, Muscodor strobelii
  misc_feature: SGI Peptide ID NO. 573958
MDKSQRRDAPIVQYLKENKDIPGDTSMPENYQLTLEKEFTRIFNDQDLKQIEDSRIDQVQSSLAELFEHGIPKAQEQGTVEIETEQDLVIVLSICGFKVRVWQLKDVDYRDKKSYDQAARAKSVEQASKRKMTQIEPKMGRHVENFLMAQSIQLGQAPPMTMFLVTKKNPQPSENRKKWYKELRTEACRRFWVKTTRQQRDQWRSMADAPPHELSQLIEQIKTEDRSRTADSFWTYQRDEEAVTDSSIYKTWDEDIVIVFDKHCEPLLCRFKGLFRFLYGNSMNKVDHAIRTWSKMPPLPIPATSRHAVDDFIRQKHPEQNLEKAESVEEIYQRHQCVVHYGTWAQKGHENPDHIFKTPDTLFHRATTERACFMLVDKGFPTFREKVLGLGSEVVRYLFQIMAPEEYEECCKVYKALPEDTRMKISEPTFATLAVLGINTFTQRHNDKTDVKLGFAGLVALGDYTGGGGDICFPQLGLKMPYKAGDCVIFRGAEMEHFVSDWTGYRIFLLFTNHQPVRRWAHRKMGKLPPKWNDDWHPDEVEAQKEGLRRAYKTETTTNTKTGRYSPCHMSLLTPDSESLTKDEKWGPMLEESSDEQSTVSNEDSAKPSKIPIGEEVSSRRTKGEDVGKDEYVAEKFARWAASS

SEQ ID NO: 40073 - DNA, 1170 bp, Muscodor strobelii
  misc_feature: SGI cDNA ID NO. 573959
  misc_feature: Encodes the peptide sequence at SEQ ID NO 40074
atggatagtcaagacttccccattcgcatcggcttcaaaggcaataaccacccccttgttttcgacctgtcgggacctgtggacttcgacgtgtctttgatagcacgtaggagtgctgaacacgacacggatcaccgagatctgatactccttaagactggctccgttttcgactttccaacaactctagacgcaggcgtcattgagctggttgacgagattagtggcaagatcgtgaccgtctgtgaccagggtaatacggatcaagtacggatctccaagaccactgaccccgaatcattcgtcactattcctgccggcagccatcaaagagaccgcacaggaaatcctctgtcgcttcacgttgcatcccgtcttcgcccgttggtacaagtagggcataaataccacctgcgattgcgtgacacaagtctcggcgtccggtggtgggtttggggaagcgtccacgcactacccaaggatagtagtgagctacctccttccgaaccaagaagacttgcttcggcgagtccggtgcgatccaaggcattcgccgtcgtgtcagagatacccgaaccgccgaagctttccatccgcctggatttagtagaagaagcttctgcaaacggaaaagatgattgcactggagtcgaagcagcatcatctcccattatacaaatcactacgacgaataagagcgatagacccatcatccttaagaccatcggggaccaaccccatctcacaacacctggagaaacaccagatccgagagcacgcgtcatagacgagcatccgaacgtgcagaatttatctatcgtcgatcaagagagccacgaggacctcattagtgatgcccctctcttcacaactcccctggccggcgggagtgggcgaggctggccgcgcaagcagttccttgcgcttgcgccacatgagcatgttatacggcaagctactctcccaggtgatagactcgtccctggaagagcataccgggtaagcttgagaccgacggggtgttggtggatgtacggaatattagacgacttgtttggcgaagatgatgacattcttaagaggtggccgtcatcgccgacagtgagaatgccactggaaagcgaggattcggtgataatttcgggatcgcgcagcagtgtgatggcttag

SEQ ID NO: 40074 - protein, 389 aa, Muscodor strobelii
  misc_feature: SGI Peptide ID NO. 573959
MDSQDFPIRIGFKGNNHPLVFDLSGPVDFDVSLIARRSAEHDTDHRDLILLKTGSVFDFPTTLDAGVIELVDEISGKIVTVCDQGNTDQVRISKTTDPESFVTIPAGSHQRDRTGNPLSLHVASRLRPLVQVGHKYHLRLRDTSLGVRWWVWGSVHALPKDSSELPPSEPRRLASASPVRSKAFAVVSEIPEPPKLSIRLDLVEEASANGKDDCTGVEAASSPIIQITTTNKSDRPIILKTIGDQPHLTTPGETPDPRARVIDEHPNVQNLSIVDQESHEDLISDAPLFTTPLAGGSGRGWPRKQFLALAPHEHVIRQATLPGDRLVPGRAYRVSLRPTGCWWMYGILDDLFGEDDDILKRWPSSPTVRMPLESEDSVIISGSRSSVMA

SEQ ID NO: 40075 - DNA, 247 bp, Muscodor strobelii
  misc_feature: SGI EST ID NO. CUFF.96811.0
  misc_feature: Variant of the nucleotide sequence at SEQ ID NO 40073
cgcgcaagcagttccttgcgcttgcgccacatgagcatgttatacggcaagctactctcccaggtgatagactcgtccctggaagagcataccgggtaagcttgagaccgacggggtgttggtggatgtacggaatattagacgacttgtttggcgaagatgatgacattcttaagaggtggccgtcatcgccgacagtgagaatgccactggaaagcgaggattcggtgataatttcgggatcgcg

SEQ ID NO: 40076 - DNA, 429 bp, Muscodor strobelii
  misc_feature: SGI cDNA ID NO. 573960
  misc_feature: Encodes the peptide sequence at SEQ ID NO 40077
atgccaaccggatcttgcctatgtggagcagtgcaagtcagctatgttggagagccagtgtttcgcgccatctgtcattgtgacgattgtaagaagattggtagttgtggtactttccaaatacccaaagaccagtttagcgtgacgaagggtcaagatgggctgagagaatacaagaaaacatctgaccacgaccacgagatatcgtgttggttttgtggcagctgtgggacaacgttgtaccgaacgggcggcgcagaggtcaacaaaagcaacatagggttgagggccggggtcttagatgatcagtcactcctccaagaaggcccaaagatcgaggtctacgtcgagaaaagactgccatgggtggctcaaatcgaaggtgcaatgcagatggacagcaagtacaatgtcgttgggggaaagtga

SEQ ID NO: 40077 - protein, 142 aa, Muscodor strobelii
  misc_feature: SGI Peptide ID NO. 573960
  misc_feature (23)..(125): Pfam Id: PF04828 Pfam Desc: Glutathione-dependent formaldehyde-activating enzyme
MPTGSCLCGAVQVSYVGEPVFRAICHCDDCKKIGSCGTFQIPKDQFSVTKGQDGLREYKKTSDHDHEISCWFCGSCGTTLYRTGGAEVNKSNIGLRAGVLDDQSLLQEGPKIEVYVEKRLPWVAQIEGAMQMDSKYNVVGGK

SEQ ID NO: 40078 - DNA, 1234 bp, Muscodor strobelii
  misc_feature: SGI EST ID NO. CUFF.96821.0
  misc_feature: Variant of the nucleotide sequence at SEQ ID NO 40076
ctgaatttccccaaaaaggcggggtgtgttgacagaatcggaatcctcctctaatggtattgctattttcttcactgccccttgcattgttccacgctattggatcatacccgacgtaatcgagcaaagcggtgagcgtggggacatccgcgcatcccgctaacttcccactacgacccattagtgagatctcataccacgcttctcttgtatcttcaccttgatcatattactcttgtgtcctgaatataatcgcgctcaccggacatctgcggatactatacgctcacgagcttgcgtcatctagccctagcagcaaaatgccaaccggatcttgcctatgtggagcagtgcaagtcagctatgttggagagccagtgtttcgcgccatctgtcattgtgacgattgtaagaagattggtagttgtggtactttccaaatacccaaagaccagtttagcgtgacgaagggtcaagatgggctgagagaatacaagaaaacatctgaccacgaccacgagatatcgtgttggttttgtggcagctgtgggacaacgttgtaccgaacgggcggcgcagaggtcaacaaaagcaacatagggttgagggccggggtcttagatgatcagtcactcctccaagaaggcccaaagatcgaggtctacgtcgagaaaagactgccatgggtggctcaaatcgaaggtgcaatgcagatggacagcaagtacaatgtcgttgggggaaagtgattggaaacgcttgagatcaagtacacgatagcttcctaggtacctagtctgcaggctctcaatccgccagcaaagagtgccgtaaaatgttgcacgggatgggacaattcaaaacgcgtcttgaggttctgacgtctgaacgggaacactcttgcgcaatctcactagcttcaggcagctaggggagctaagcgcagcctatagagatcgttagaaggtcgaccctggggctgtagtggatgcttacaggggatccataccacaaacatcctaaacgatagtggatttctcgcgaagccgcgtttcgtggcgctttttcttgaaccattcacgaaatatttgatgaagagaccacctcagtgttgtcgaattctctgcatcaatatgtgtatttccattatcccaaatcgtcccccaaccacattacgctcactccgtcgcgcgtctcgacaaggggtctgtatgatctgcccacgaaggccaag

SEQ ID NO: 40079 - DNA, 1368 bp, Muscodor strobelii
  misc_feature: SGI cDNA ID NO. 573961
  misc_feature: Encodes the peptide sequence at SEQ ID NO 40080
atggaccccttagctactcccacgttcgacagcaccccgagccaacacacgtctgtcggaggcaattgctgggacgaatgcagttgggagaacacaacagagacaaatgagcacacgggatcagaatgcgtggagaagatgactaagtcagacacgatggctctgataaaaatctggtcggcgctccccattgcgtatcagaagctaggtcaccatgtttcttccatgctgtctccgactccactggccgacctgaacaacactttgtcggagagcggcaacgataccgacacactgccggacagtaaatctaacgaccactcacaggacaatgacagtggcacattgtcgggcgagacagaatgcgacgatgactcgcccgaggatgccaaagacgccacactacaagaggatgacgacgaagacaagccattgtcaaaagatgaggcagatcaaaagaggctccagaaagtcaatgacatcgtagacagccgttgggacattcgatcatcttcgacccgctacaagcgcgttttagtgctaatgatccaatgggaggatagcgacctgcgcagcgagatagaccacagtcttgaggaatacacatggatgttcgaacagctatacaaatacgaagtttcgacgtacgaaattcccagtggaaagccacaaattgctctgctcaatcgattgatacagttagtcgaggccgacagtcccgagacactcttcattatctgctcaccggcagtcgattcttcagtagtcgccaatgctctcggggattgtgaaggagatgtcttactcgttgtcaatgcttgtgctggcttgacctgcgaccgcttcaacaccaagggcgttgtcgagtgtatcagtgccagcgccttcaacacgataacgccaggttcagtacttccgagtgacctaagcccaagcatgacttgggcggcactcaaaatactccgggacaaaaattgcgtcgaagatggtgttagtataccagaactgcatcgcagaatttgtttagcgacacaatgggctgcttcagaccacgttccggatgctcatggaatacctggcgagatgggctggaaatattcagagtgtcgacctcagccagtttacacaaggctgtctgccgatcctgtaggccaccatggagcaacacggagcatcgtgcttcggaagctcatggaggtgcgaccggagtggcgttgcatgatgtcgccagacattcaaatcacaatacagctcgagaaccggtacacggctatggatccgaaagagtgggcagattggattcattccgcaccgcccgcaatacgtattgcagttgtggagaaggcaccagctcggccggatccgtag

SEQ ID NO: 40080 - protein, 455 aa, Muscodor strobelii
  misc_feature: SGI Peptide ID NO. 573961
MDPLATPTFDSTPSQHTSVGGNCWDECSWENTTETNEHTGSECVEKMTKSDTMALIKIWSALPIAYQKLGHHVSSMLSPTPLADLNNTLSESGNDTDTLPDSKSNDHSQDNDSGTLSGETECDDDSPEDAKDATLQEDDDEDKPLSKDEADQKRLQKVNDIVDSRWDIRSSSTRYKRVLVLMIQWEDSDLRSEIDHSLEEYTWMFEQLYKYEVSTYEIPSGKPQIALLNRLIQLVEADSPETLFIICSPAVDSSVVANALGDCEGDVLLVVNACAGLTCDRFNTKGVVECISASAFNTITPGSVLPSDLSPSMTWAALKILRDKNCVEDGVSIPELHRRICLATQWAASDHVPDAHGIPGEMGWKYSECRPQPVYTRLSADPVGHHGATRSIVLRKLMEVRPEWRCMMSPDIQITIQLENRYTAMDPKEWADWIHSAPPAIRIAVVEKAPARPDP

SEQ ID NO: 40081 - DNA, 1245 bp, Muscodor strobelii
  misc_feature: SGI cDNA ID NO. 573962
  misc_feature: Elevated expression when VOC is produced
  misc_feature: Encodes the peptide sequence at SEQ ID NO 40082
atggggtggggatcgggtacctcaaacttcccgtatctcattacgcccgactcggcactgcaggctcaagccgtggctgatggaagtcggtacgaaagcatattcgacaattatgatgctgcaaaaatcgccgctcttgcatctcagcccgacgctacctgccttgtgttcggtaatgcggactcaggcgagggctacatccccgtggacgacaacgaaggagatcgcaagaatctgactttatggcagaatgccgatgcggtgattcagaatgtcagcgccctttgcaacaacaccatcgttgtcatccactctggagggcctgttttgatgaccgattggttcgactcccctaacatcaccgcggtcgtctgggctggcatgcctggccaagaatccggaaactctttggtcgatatcttgtacggcaaagagaacccagcaggccgctctcctttcacctgggccaagaagcgggaagactacggcactgatgtcttgtatgagcctaacaacggtaatggggcaccacaacaagagtttaccgagggcgtctacattgattatcgccacttcgacaaagctggtatcgaaccaatcagagaattcggatttggtctatcgtatactacgttcaaatactccaagatcagcgtcgtcaagaaacatgttcagacttacaagccaacaaaggggaagaccgtcaaagcacccaccctgggcgctacaccaagcaagaatctcgctgactacaagttccctgagggttggagatatgttccagctttcatctacccttacctcaacaagaccaactcgcttaaggcagcttcgcttgaccccgaatatggtcgcaccgactttatcccagcacatggacgagatggttcgcctcagccgttcgcaggtgcaagtgacaagacagcgccaggtggaaacgcacagctatacgatgtgatgtacgaggttgaggtgactatcaccaacagcggcaacgttgacggggatgaggtgccccagctttacgtcgagcttggcggcgacaatccacccctccagttgcgcgacttcggtcgcatcaacatcaaagctggcaagagcaagacctggcgtgggaagatcacgagacgtgacctcagtaactgggacaccacaacccagaactgggtcatcaacagcgaggccaagaaggtccacgttggtggcagcagtcgcaatttaccggtctctgctgatctgccttga

SEQ ID NO: 40082 - protein, 414 aa, Muscodor strobelii
  misc_feature: SGI Peptide ID NO. 573962
  misc_feature (1)..(189): Pfam Id: PF01915 Pfam Desc: Glycosyl hydrolase family 3 C terminal domain
  misc_feature (1)..(414): SWISSPROT Homolog: EC 3.2.1.21 Beta-glucosidase
  misc_feature: Useful for introducing or modulating the production of volatile compounds
MGWGSGTSNFPYLITPDSALQAQAVADGSRYESIFDNYDAAKIAALASQPDATCLVFGNADSGEGYIPVDDNEGDRKNLTLWQNADAVIQNVSALCNNTIVVIHSGGPVLMTDWFDSPNITAVVWAGMPGQESGNSLVDILYGKENPAGRSPFTWAKKREDYGTDVLYEPNNGNGAPQQEFTEGVYIDYRHFDKAGIEPIREFGFGLSYTTFKYSKISVVKKHVQTYKPTKGKTVKAPTLGATPSKNLADYKFPEGWRYVPAFIYPYLNKTNSLKAASLDPEYGRTDFIPAHGRDGSPQPFAGASDKTAPGGNAQLYDVMYEVEVTITNSGNVDGDEVPQLYVELGGDNPPLQLRDFGRINIKAGKSKTWRGKITRRDLSNWDTTTQNWVINSEAKKVHVGGSSRNLPVSADLP

SEQ ID NO: 40083 - DNA, 1404 bp, Muscodor strobelii
  misc_feature: SGI EST ID NO. CUFF.96838.0
  misc_feature: Variant of the nucleotide sequence at SEQ ID NO 40081
tttggagaggacgctggtcctagttcagttggtcccaatggctgtggcgatcgtggttgtgatgacggcaccttggctatggggtggggatcgggtacctcaaacttcccgtatctcattacgcccgactcggcactgcaggctcaagccgtggctgatggaagtcggtacgaaagcatattcgacaattatgatgctgcaaaaatcgccgctcttgcatctcagcccgacgctacctgccttgtgttcggtaatgcggactcaggcgagggctacatccccgtggacgacaacgaaggagatcgcaagaatctgactttatggcagaatgccgatgcggtgattcagaatgtcagcgccctttgcaacaacaccatcgttgtcatccactctggagggcctgttttgatgaccgattggttcgactcccctaacatcaccgcggtcgtctgggctggcatgcctggccaagaatccggaaactctttggtcgatatcttgtacggcaaagagaacccagcaggccgctctcctttcacctgggccaagaagcgggaagactacggcactgatgtcttgtatgagcctaacaacggtaatggggcaccacaacaagagtttaccgagggcgtctacattgattatcgccacttcgacaaagctggtatcgaaccaatcagagaattcggatttggtctatcgtatactacgttcaaatactccaagatcagcgtcgtcaagaaacatgttcagacttacaagccaacaaaggggaagaccgtcaaagcacccaccctgggcgctacaccaagcaagaatctcgctgactacaagttccctgagggttggagatatgttccagctttcatctacccttacctcaacaagaccaactcgcttaaggcagcttcgcttgaccccgaatatggtcgcaccgactttatcccagcacatggacgagatggttcgcctcagccgttcgcaggtgcaagtgacaagacagcgccaggtggaaacgcacagctatacgatgtgatgtacgaggttgaggtgactatcaccaacagcggcaacgttgacggggatgaggtgccccagctttacgtcgagcttggcggcgacaatccacccctccagttgcgcgacttcggtcgcatcaacatcaaagctggcaagagcaagacctggcgtgggaagatcacgagacgtgacctcagtaactgggacaccacaacccagaactgggtcatcaacagcgaggccaagaaggtccacgttggtggcagcagtcgcaatttaccggtctctgctgatctgccttgattcgatgagcagccaatttccatagacaataattcttaaatctagtctagtaatcttaatctaccatttggacaaaaagca

SEQ ID NO: 40084 - DNA, 819 bp, Muscodor strobelii
  misc_feature: SGI cDNA ID NO. 573963
  misc_feature: Encodes the peptide sequence at SEQ ID NO 40085
atgggaaattccgaaatcatcgaccttgttcgcatagtacgtctcctcgttcaatatctcaccgtcaagcgacaattcgaccagagctgggtacttcatatccgcggactctgcgctcttcagtcaaggataccagaccgcagcgagacactgagcttgtgcattcccattgtgtatgaaagcatcatgaaattctccccgtacgatcacggtccccccaacgatggtctttctatcgattttcttcttcgcctcgaggatgctcggttaatacgagactatggatgttctcccgaacttcttcatctattgggcaccattaacattaaggtctgcaacatgagtaaagacccgctagagaaagaaatgactgcccaatcactccttgcggaatgtgacaatattgtacagacatctcttgagaatgaccggcacgaccttgttaaaacgactgcagaatcatacgtccatatggcacgcgtcatcatctgctggcgatttggtttcccctctgacgcgcttcatgcccttggagacgatcttgcacgctgtgttcggcgtattcctactaaaggcagtttgtttactgctcagtatcccctcgcatcagctttttgggctatcatattcagccccgacatgggagatcaatgcgtacgcgaattaagaagcgtctggacagaccgacctactaacatcacgcacgcattgcgtgtcgctgagaagattattacccggcctttggatacggtcgtcgatatggacctgttcaagagcatcatgtcttctatgaaaatgaatgtgctaagccttggctaa

SEQ ID NO: 40085 - protein, 272 aa, Muscodor strobelii
  misc_feature: SGI Peptide ID NO. 573963
MGNSEIIDLVRIVRLLVQYLTVKRQFDQSWVLHIRGLCALQSRIPDRSETLSLCIPIVYESIMKFSPYDHGPPNDGLSIDFLLRLEDARLIRDYGCSPELLHLLGTINIKVCNMSKDPLEKEMTAQSLLAECDNIVQTSLENDRHDLVKTTAESYVHMARVIICWRFGFPSDALHALGDDLARCVRRIPTKGSLFTAQYPLASAFWAIIFSPDMGDQCVRELRSVWTDRPTNITHALRVAEKIITRPLDTVVDMDLFKSIMSSMKMNVLSLG

SEQ ID NO: 40086 - DNA, 4725 bp, Muscodor strobelii
  misc_feature: SGI EST ID NO. CUFF.96911.1
  misc_feature: Variant of the nucleotide sequence at SEQ ID NO 40084
aaaatgcaaaggcatctggtagagaacctacctacaggccatcctgggtgagcgcgacaaggatggcaggggtgggtaaacaacacataaaggggtgcgagatcacttgccataaattcgtcaacctctgccaagtgtctcatacaagcgcgatcggtttctagttcactattactttcaagtttaaggggttaatgcgcgatccattgattctcaagtatgcctacctctaggctctgggaagaccgtagtgagctgagcaacggtgaaatcgcagagctcattgtcgaatatcgtcacctctgcgagttacttcaggccgaactcatctcacgtgagacagctaaagagttctacctagaagatgcacgcgagcaattacagcagaaggtgagagagctccagcactctgggctgagttccaaggatcacgacctgataacaaaagcggagcatcccggaattgttgccatcagagacggccgggctccaaacagaaatgagtcaacaacttgggtgcgtaatgcttatacagagttgatttggctggtatgcaaaactacaacaactatgcatgggctccttctggtcatcgctattaagcaacgcacactggcgatgttcaatctccgtcagaagtcagtgcttgtggcatttattaaagagcatgagactgcattctcttgccctgctctgaagcctgatacggaattgctctctgctgaaagaaatgcatcagtaatagcctctatgccatgccgctcgtcgagcgcaggccgttgcaaagcctccgacgctgattccctgaacatatcgaacccattgtcctctgtatttgattctacagactcgattccaaattcaagcgaccgcggaatgggccaggagctctgtaagacccggaagcgaaagcgaccaataaatggtccaggacagccagactgcccgttctctatgcctcctcgtggacttgttgccacccacacgctcaatgaacctcactataccgctacatatgggcaacaggttaaacacttttcgcatgccacttcaccgagccatcaccatgaaaattgcctggcaaacatgtgtcaagcaagtttcgagcccaatcatgcaacacagaggggagattgccctcatccaggaacctgtagcaacaactttcccctgtccgacaaatcatacctgtcgctcgcggaaagctattacagaccgatgtcatttacctccgtcaacactcatattagattcatgccttcgcaagatgcactggttaaatgtcgtcagctccctagttacaggatcgaagatattgtcgagtctgagctgagatgtgaggatcgaagtgagaaaaccgatggcgaatcgcccggacctgccaccgaggccgaggctgatttcggctttgaaaaaacccatacgccatatgttcaagggggtattagagcacaatcagccgaacgtgtcatagcagccggcggcaattccaacatgcctttttcgcttcgagagagatcaccgatgtcgccttttacgcaatcctcgctgccatcgtcattagcactagtgtcagagattaccggagacgacgtcgagtccatggctaggaacaaaatgtgcaaaagctcaatgacatcttcgtcattgacatcatctcaaaggttactgtcgcacctgcaacggccaaccgataaaagcaagtgccgaaacaccacgaataaggacgctgtggagaagcatggaatagatgtggctatcacctctgtgcaaacagttggagatgaagagtttgtgggcgggaaagacatgaactcgtaccttaacgcaccaagtagtcgcaaacctagactttgccaccacagtttacatatttctccaaacccacttgcgacagtgtgtgagaatgagaccgagtggcaactctatgaatattatatcaagaatttttgccgaacgcgcacgctttatagcgattcaagatataactcgtatctccaatccctaccaagtaacccaagcagagcgcttatggcggccattttttgcctggcatctctatacctctgccgtgatgaaacgccatatctcggcactgtcattacatttctcaaaagggcaatcatgggaaattccgaaatcatcgaccttgttcgcatagtacgtctcctcgttcaatatctcaccgtcaagcgacaattcgaccagagctgggtacttcatatccgcggactctgcgctcttcagtcaaggataccagaccgcagcgagacactgagcttgtgcattcccattgtgtatgaaagcatcatgaaattctccccgtacgatcacggtccccccaacgatggtctttctatcgattttcttcttcgcctcgaggatgctcggttaatacgagactatggatgttctcccgaacttcttcatctattgggcaccattaacattaaggtctgcaacatgagtaaagacccgctagagaaagaaatgactgcccaatcactccttgcggaatgtgacaatattgtacagacatctcttgagaatgaccggcacgaccttgttaaaacgactgcagaatcatacgtccatatggcacgcgtcatcatctgctggcgatttggtttcccctctgacgcgcttcatgcccttggagacgatcttgcacgctgtgttcggcgtattcctactaaaggcagtttgtttactgctcagtatcccctcgcatcagctttttgggctatcatattcagccccgacatgggagatcaatgcgtacgcgaattaagaagcgtctggacagaccgacctactaacatcacgcacgcattgcgtgtcgctgagaagattattacccggcctttggatacggtcgtcgatatggacctgttcaagagcatcatgtcttctatgaaaatgaatgtgctaagccttggctaagaactcaattggcgctaactggcgactgctgcaacttgtccgttgtcattctggaggatgagataagggtgtcacagattgaagttatagccgtgttcggataggaaacactcgttgtcacagttctgactgctggtagggtccagtaatgactattgttgctgtacaaggaaggaagaggaaagctatctaaataggggctgagaaatgaggctatatacaccgtatcatggcctgtgcgccacctaatccctgtatcgtcaacctcgttccgtgacactcgttcaaatagttacagggagaagaccctcttcctttcgttgcttatgagctgccttctccatggcagcaaaatcccctcggccgacaaggcgaggttgatcgccatgtagtgggcacacctctgggctccacccgtaccgatccgggatttgcccattagtgagaagatcaacaatgtatccgcccagagtcggcagatctttggcgcgattgaaagatccaccagccgcacaaaccagattcccatagtctgggtgcctggtaagaagaggaacttgtgtgtgcgtaacaccatccctattctggtttagctgcaagaacgcccttacgccgagttctgcttaccagaaagaagcaatagagacgatagatgcaccctcgagagcgggtatgaatttcctcgcccacacaatggccttcgccatttgtactcgagcaagctgggtgttggcaaagtcattgacccgtgaaagagaagatgcacctgaattggtgaatggttctatccatgtgagttttcctattctgccccctcctgcagggggcaggaagtcaactgagaaaagttagaatgtgacaaaagtcgacctttttcaaggcttacccattccgttgtgagagaccatgggcttgtttttgaaatactcaacctgtctgtcggtcatttgaataacataggagaatatgccggttgctattggaattctgctttggggtgggtggagaatcgatgatttctcaagcacgtcggcgaaccagggtccaacagctaaaacaatctccgcctttcccacttcaatcctttgtccgtcttccagcacaatggtcgtgacaagtccattgtcatgatccagggactcaacagtgctttgataaaacataccgccgctatcaacacaaaaatccctggctctttccctcaattggaaaatacagctttcccaatctacgatggcatcgtcataattgtaaacataatctagatgatcgggagcgttagatgcttcaaacatctccttcattatgccgctatcgcgaaggagccgcggctccatgccgagccgctcccggctgttgttattgtcatggaatagatatcgatcttctttgtccgagaccacaatgcgaccggtggtccgaatggcattcggaaactctttccaccaccgagccagactctcagctgcctcggctgttcgttcccagctagggtaatcaacacgaactactttggaaatatcatcacttggtgctaggcgagatggtctggagataatcgacagctttgcatgaggcaacttctggcggatgtgatttgctgttgaaaggccgaacaccccagtaccaatgataataatatccatatatagtcactgtttgcgaataggcgactgaaagataatttccgaccttcgaaactatcttagagaagagaataaaatcgacttttgtgcaataataaagcggtaagatatctaagatagcgggggtatatgaatg

SEQ ID NO: 40087 - DNA, 1266 bp, Muscodor strobelii
  misc_feature: SGI cDNA ID NO. 573964
  misc_feature: Encodes the peptide sequence at SEQ ID NO 40088
atggatattattatcattggtactggggtgttcggcctttcaacagcaaatcacatccgccagaagttgcctcatgcaaagctgtcgattatctccagaccatctcgcctagcaccaagtgatgatatttccaaagtagttcgtgttgattaccctagctgggaacgaacagccgaggcagctgagagtctggctcggtggtggaaagagtttccgaatgccattcggaccaccggtcgcattgtggtctcggacaaagaagatcgatatctattccatgacaataacaacagccgggagcggctcggcatggagccgcggctccttcgcgatagcggcataatgaaggagatgtttgaagcatctaacgctcccgatcatctagattatgtttacaattatgacgatgccatcgtagattgggaaagctgtattttccaattgagggaaagagccagggatttttgtgttgatagcggcggtatgttttatcaaagcactgttgagtccctggatcatgacaatggacttgtcacgaccattgtgctggaagacggacaaaggattgaagtgggaaaggcggagattgttttagctgttggaccctggttcgccgacgtgcttgagaaatcatcgattctccacccaccccaaagcagaattccaatagcaaccggcatattctcctatgttattcaaatgaccgacagacaggttgagtatttcaaaaacaagcccatggtctctcacaacggaatggttgacttcctgccccctgcaggagggggcagaataggaaaactcacatggatagaaccattcaccaattcaggtgcatcttctctttcacgggtcaatgactttgccaacacccagcttgctcgagtacaaatggcgaaggccattgtgtgggcgaggaaattcatacccgctctcgagggtgcatctatcgtctctattgcttctttctgggatggtgttacgcacacacaagttcctcttcttaccaggcacccagactatgggaatctggtttgtgcggctggtggatctttcaatcgcgccaaagatctgccgactctgggcggatacattgttgatcttctcactaatgggcaaatcccggatcggtacgggtggagcccagaggtgtgcccactacatggcgatcaacctcgccttgtcggccgaggggattttgctgccatggagaaggcagctcataagcaacgaaaggaagagggtcttctccctgtaactatttga

SEQ ID NO: 40088 - protein, 421 aa, Muscodor strobelii
  misc_feature: SGI Peptide ID NO. 573964
  misc_feature (2)..(368): Pfam Id: PF01266 Pfam Desc: FAD dependent oxidoreductase
  misc_feature (2)..(209): Pfam Id: PF01266 Pfam Desc: FAD dependent oxidoreductase
MDIIIIGTGVFGLSTANHIRQKLPHAKLSIISRPSRLAPSDDISKVVRVDYPSWERTAEAAESLARWWKEFPNAIRTTGRIVVSDKEDRYLFHDNNNSRERLGMEPRLLRDSGIMKEMFEASNAPDHLDYVYNYDDAIVDWESCIFQLRERARDFCVDSGGMFYQSTVESLDHDNGLVTTIVLEDGQRIEVGKAEIVLAVGPWFADVLEKSSILHPPQSRIPIATGIFSYVIQMTDRQVEYFKNKPMVSHNGMVDFLPPAGGGRIGKLTWIEPFTNSGASSLSRVNDFANTQLARVQMAKAIVWARKFIPALEGASIVSIASFWDGVTHTQVPLLTRHPDYGNLVCAAGGSFNRAKDLPTLGGYIVDLLTNGQIPDRYGWSPEVCPLHGDQPRLVGRGDFAAMEKAAHKQRKEEGLLPVTI

SEQ ID NO: 40089 - DNA, 4915 bp, Muscodor strobelii
  misc_feature: SGI EST ID NO. CUFF.96912.2
  misc_feature: Variant of the nucleotide sequence at SEQ ID NO 40087
cattcatatacccccgctatcttagatatcttaccgctttattattgcacaaaagtcgattttattctcttctctaagatagtttcgaaggtcggaaattatctttcagtcgcctattcgcaaacagtgactatatatggatattattatcattggtactggggtgttcggcctttcaacagcaaatcacatccgccagaagttgcctcatgcaaagctgtcgattatctccagaccatctcgcctagcaccaagtgatgatatttccaaagtagttcgtgttgattaccctagctgggaacgaacagccgaggcagctgagagtctggctcggtggtggaaagagtttccgaatgccattcggaccaccggtcgcattgtggtctcggacaaagaagatcgatatctattccatgacaataacaacagccgggagcggctcggcatggagccgcggctccttcgcgatagcggcataatgaaggagatgtttgaagcatctaacgctcccgatcatctagattatgtttacaattatgacgatgccatcgtagattgggaaagctgtattttccaattgagggaaagagccagggatttttgtgttgatagcggcggtatgttttatcaaagcactgttgagtccctggatcatgacaatggacttgtcacgaccattgtgctggaagacggacaaaggattgaagtgggaaaggcggagattgttttagctgttggaccctggttcgccgacgtgcttgagaaatcatcgattctccacccaccccaaagcagaattccaatagcaaccggcatattctcctatgttattcaaatgaccgacagacaggttgagtatttcaaaaacaagcccatggtctctcacaacggaatggttgacttcctgccccctgcaggagggggcagaataggaaaactcacatggatagaaccattcaccaattcaggtgcatcttctctttcacgggtcaatgactttgccaacacccagcttgctcgagtacaaatggcgaaggccattgtgtgggcgaggaaattcatacccgctctcgagggtgcatctatcgtctctattgcttctttctgggatggtgttacgcacacacaagttcctcttcttaccaggcacccagactatgggaatctggtttgtgcggctggtggatctttcaatcgcgccaaagatctgccgactctgggcggatacattgttgatcttctcactaatgggcaaatcccggatcggtacgggtggagcccagaggtgtgcccactacatggcgatcaacctcgccttgtcggccgaggggattttgctgccatggagaaggcagctcataagcaacgaaaggaagagggtcttctccctgtaactatttgaacgagtgtcacggaacgaggttgacgatacagggattaggtggcgcacaggccatgatacggtgtatatagcctcatttctcagcccctatttagatagctttcctcttccttccttgtacagcaacaatagtcattactggaccctaccagcagtcagaactgtgacaacgagtgtttcctatccgaacacggctataacttcaatctgtgacacccttatctcatcctccagaatgacaacggacaagttgcagcagtcgccagttagcgccaattgagttcttagccaaggcttagcacattcattttcatagaagacatgatgctcttgaacaggtccatatcgacgaccgtatccaaaggccgggtaataatcttctcagcgacacgcaatgcgtgcgtgatgttctgcttagacttagtatctgcttggaaataaaatgacccagtcattgtgtcattatctagtgaacctacagtaggtcggtctgtccagacgcttcttaattcgcgtacgcattgatctcccatgtcggggctgaatatgatagcccaaaaagctgatgcgaggggatactgagcagtaaacaaactgcctttagtaggaatacgccgaacacagcgtgcaagatcgtctccaagggcatgaagcgcgtcagaggggaaaccaaatcgccagcagatgatgacgcgtgccatatggacgtatgattctgcagtcgttttaacaaggtcgtgccggtcattctcaagagatgtctgtacaatattgtcacattccgcaaggagtgattgggcagtcatttctttctctagcgggtctttactcatgttgcagaccttaatgttaatggtgcccaatagatgaagaagttcgggagaacatccatagtctcgtattaaccgagcatcctcgaggcgaagaagaaaatcgatagaaagaccatcgttggggggaccgtgatcgtacggggagaatttcatgatgctttcatacacaatgggaatgcacaagctcagtgtctcgctgcggtctggtatccttgactgaagagcgcagagtccgcggatatgaagtacccagctctggtcgaattgtcgcttgacggtgagatattgaacgaggagacgtactatgcgaacaaggtcgatgatttcggaatttcccatgattgcccttttgagaaatgtaatgacagtgccgagatatggcgtttcatcacggcagaggtatagagatgccaggcaaaaaatggccgccataagcgctctgcttgggttacttggtagggattggagatacgagttatatcttgaatcgctataaagcgtgcgcgttcggcaaaaattcttgatatctgtattgcatttagtagacgaacgatagcattgagataaatatctatcagcacacaatattcatagagttgccactcggtctcattctcacacactgtcgcaagtgggtttggagaaatatgtaaactgtggtggcaaagtctaggtttgcgactacctatttctaacaattaatgctaatggctcagaaaaaacagaaacaatagggtaagcttacttggtgcgttaaggtacgagttcatgtctttcccgcccacaaactcttcatctccaactgtttgcacagaggtgatagccacatctattccatgcttctccacagcgtccttattcgtggtgtttcggcacttgcttttatcggttggccgttgcaggtgcgacagtaacctttgagatgatgtcaatgacgaagatgtcattgagcttttgcacattttgttcctagccatggactcgacgtcgtctccggtaatctctgacactagtgctaatgacgatggcagcgaggattgcgtaaaaggcgacatcggtgatctctctcgaagcgaaaaaggcatgttggaattgccgccggctgctatgacacgttcggctgattgtgctctaatacccccttgaacatatggcgtatgggttttttcaaagccgaaatcagcctcggcctcggtggcaggtccgggcgattcgccatcggttttctcacttcgatcctcacatctcagctcagactcgacaatatcttcgatcctgtaactagggagctgacgacatttaaccagtgcatcttgcgaaggcatgaatctaatatgagtgttgacggaggtaaatgacatcggtctgtaatagctttccgcgagcgacaggtatgatttgtcggacaggggaaagttgttgctacaggttcctggatgagggcaatctcccctctgtgttgcatgattgggctcgaaacttgcttgacacatgtttgccaggcaattttcatggtgatggctcggtgaagtggcatgcgaaaagtgtttaacctgttgcccatatgtagcggtatagtgaggttcattgagcgtgtgggtggcaacaagtccacgaggaggcatagagaacgggcagtctaggcaagggatattagctgagaaactaaactagcacctagtcaatctacctggctgtcctggaccatttattggtcgctttcgcttccgggtcttacagagctcctggcccattccgcggtcgcttgaatttggaatcgagtctgtagaatcaaatacagaggacaatgggttcgatatgttcagggaatcagcgtcggaggctttgcaacggcctgcgctcgacgagcggcatggcatagaggctattactgatgctgcgacttgttaacaaacatgtccactcttctaggtgctacacaagtaccatttctttcagcagagagcaattccgtatcaggcttcagagcagggcaagagaatgcagtctcatgctctttaataaatgccacaagcactgacttctgacggagattgaacatcgccagtgtgcgttgcttaatagcgatgaccagaaggagcccatgcatagttgttgtagttttgcataccagccaaatcaactctgtataagcattacgcacccaagttgttgactcatttctgtttggagcccggccgtctctgatggcaacaattccgggatgctccgcttttgttatcaggtcgtgatccttggaactcagcccagagtgctggagctctctcaccttctgctgtaattgctcgcgtgcatcttctaggtagaactctttagctgtctcacgtgagatgagttcggcctgaagtaactcgcagaggtgacgatattcgacaatgagctctgcgatttcaccgttgctcagctcactacggtcttcccagagcctagaggtaggcatacttgagaatcaatggatcgcgcattaaccccttaaacttgaaagtaatagtgaactagaaaccgatcgcgcttgtatgagacacttggcagaggttgacgaatttatggcaagtgatctcgcacccctttatgtgttgtttacccacccctgccatccttgtcgcgctcacccaggatggcctgtaggtaggttctctaccagatgcctttgcatttt

SEQ ID NO: 40090 - DNA, 957 bp, Muscodor strobelii
  misc_feature: SGI cDNA ID NO. 573965
  misc_feature: Encodes the peptide sequence at SEQ ID NO 40091
atggagccgcggctccttcgcgatagcggcataatgaaggagatgtttgaagcatctaacgctcccgatcatctagattatgtttacaattatgacgatgccatcgtagattgggaaagctgtattttccaattgagggaaagagccagggatttttgtgttgatagcggcggtatgttttatcaaagcactgttgagtccctggatcatgacaatggacttgtcacgaccattgtgctggaagacggacaaaggattgaagtgggaaaggcggagattgttttagctgttggaccctggttcgccgacgtgcttgagaaatcatcgattctccacccaccccaaagcagaattccaatagcaaccggcatattctcctatgttattcaaatgaccgacagacaggttgagtatttcaaaaacaagcccatggtctctcacaacggaatggttgacttcctgccccctgcaggagggggcagaataggaaaactcacatggatagaaccattcaccaattcaggtgcatcttctctttcacgggtcaatgactttgccaacacccagcttgctcgagtacaaatggcgaaggccattgtgtgggcgaggaaattcatacccgctctcgagggtgcatctatcgtctctattgcttctttctgggatggtgttacgcacacacaagttcctcttcttaccaggcacccagactatgggaatctggtttgtgcggctggtggatctttcaatcgcgccaaagatctgccgactctgggcggatacattgttgatcttctcactaatgggcaaatcccggatcggtacgggtggagcccagaggtgtgcccactacatggcgatcaacctcgccttgtcggccgaggggattttgctgccatggagaaggcagctcataagcaacgaaaggaagagggtcttctccctgtaactatttga

SEQ ID NO: 40091 - protein, 318 aa, Muscodor strobelii
  misc_feature: SGI Peptide ID NO. 573965
  misc_feature (12)..(106): Pfam Id: PF01266 Pfam Desc: FAD dependent oxidoreductase
MEPRLLRDSGIMKEMFEASNAPDHLDYVYNYDDAIVDWESCIFQLRERARDFCVDSGGMFYQSTVESLDHDNGLVTTIVLEDGQRIEVGKAEIVLAVGPWFADVLEKSSILHPPQSRIPIATGIFSYVIQMTDRQVEYFKNKPMVSHNGMVDFLPPAGGGRIGKLTWIEPFTNSGASSLSRVNDFANTQLARVQMAKAIVWARKFIPALEGASIVSIASFWDGVTHTQVPLLTRHPDYGNLVCAAGGSFNRAKDLPTLGGYIVDLLTNGQIPDRYGWSPEVCPLHGDQPRLVGRGDFAAMEKAAHKQRKEEGLLPVTI

SEQ ID NO: 40092 - DNA, 4915 bp, Muscodor strobelii; identical to SEQ ID NO: 40089
  misc_feature: SGI EST ID NO. CUFF.96912.2
  misc_feature: Variant of the nucleotide sequence at SEQ ID NO 40090

SEQ ID NO: 40093 - DNA, 459 bp, Muscodor strobelii
  misc_feature: SGI cDNA ID NO. 573966
  misc_feature: Elevated expression when VOC is produced
  misc_feature: Encodes the peptide sequence at SEQ ID NO 40094
atgttccctcaagcttctaccaccgccaccaacgaggacagagtcacgatctgcacttgcatcgatggcttcatgtgcatacgcgtaacatcggagcatgagaagagcccgtacgctcgcgaggagggacccatagagcagatcaaactcaagcacagcggcagggacatcgactacatctcattgaaagatatgacggtcgagatggctttgttatttgcagacggcatgggcgcggaagtttttgagatgattcgagacagctcgcacccgagcgaaacgcaatggtcttaccctcaacttgttggaatccaagcggtggagctgctttaccaactcaatatccggtacgaaaaacacgaccctggcaacacaagaagtctgaaagatgatcgacttggagtgatacatgaactcatccgcatcgttgagaatgatgctgtgtatcctaatgagtag

SEQ ID NO: 40094 - protein, 152 aa, Muscodor strobelii
  misc_feature: SGI Peptide ID NO. 573966
  misc_feature: Useful for introducing or modulating the production of volatile compounds
MFPQASTTATNEDRVTICTCIDGFMCIRVTSEHEKSPYAREEGPIEQIKLKHSGRDIDYISLKDMTVEMALLFADGMGAEVFEMIRDSSHPSETQWSYPQLVGIQAVELLYQLNIRYEKHDPGNTRSLKDDRLGVIHELIRIVENDAVYPNE

SEQ ID NO: 40095 - DNA, 1619 bp, Muscodor strobelii
  misc_feature: SGI EST ID NO. CUFF.96883.0
  misc_feature: Variant of the nucleotide sequence at SEQ ID NO 40093
ctactacaatagactcaaacacagcatattgtcctggacgacagtcagctggtagccaaggcaagttcctcttattagaagttatccataatcgatcgtcgctaagcccaaatggtataacatgtgctcgattacagtcagtgtcagcatagagaggggatatagtggataatccgtcgatgacagagtctccagtacgtatgcatagaaaggatatctagagccattcgtaggagtcgtggaaattggtgccgttttcgatgccagtaagcccgtgggtccctctccttgccgccagtcttctggatgtcaccgacaccgcggtacagaagccgcctccaatactgggccgattatgtgttcaggattttccgattcgaacgatcgataatggctcatatacaaacctggggccagaagtggacttagcccccgtgatatctctttctaatccggcaaaggaacggaaccgcaggattattatatatagcatactgcatccctggagcagtgtacaggatatcaatcacgattactaaatattaaccttttcacatgatgttccctcaagcttctaccaccgccaccaacgaggacagagtcacgatctgcacttgcatcgatggcttcatgtgcatacgcgtaacatcggagcatgagaagagcccgtacgctcgcgaggagggacccatagagcagatcaaactcaagcacagcggcagggacatcgactacatctcattgaaagatatgacggtcgagatggctttgttatttgcagacggcatgggcgcggaagtttttgagatgattcgagacagctcgcacccgagcgaaacgcaatggtcttaccctcaacttgttggaatccaagcggtggagctgctttaccaactcaatatccggtacgaaaaacacgaccctggcaacacaagaagtctgaaagatgatcgacttggagtgatacatgaactcatccgcatcgttgagaatgatgctgtgtatcctaatgagtaggctcgatatggccatatgctggtagacaccactttgtatcggttcgtttatcaagaatccgtaatcacggatagaattgtgattttattctccgctctgctgtgattgaattatttaggggccgaatagtttactctttgagttctggcacaagccctgttgttcctttccttgactcgtgacattgcatcgatggactcgatgtaaattttgtccatttcgacatttgatgcattgatccatatttgtacaaaaacgggatgccagcgatccttgttgggtcgcgacgatgggcttccttctttcgttggttcgtaacaggacaattaaggaggagtgtttcattgtcattgttatttctagtgacagagttgatatttaataacccagaggtatgaaggatcgaggtgatgtgcatgagtgtaatgataaacgcgctatagtctaacataggggatcaagattgggaccatgccaccagctaagtcatcaacttcagacctgtaccatctcccagaccgtgagcgagcgggattgccgcgctgctggtatctctaagcaactggcgaaggaagtgtcagaattaagtgagatcattgtta

SEQ ID NO: 40096 - DNA, 1089 bp, Muscodor strobelii
  misc_feature: SGI cDNA ID NO. 573967
  misc_feature: Elevated expression when VOC is produced
  misc_feature: Encodes the peptide sequence at SEQ ID NO 40097
gcaaatcaagctgtcgacgccacgcccgcagaccaccctaatcgagctggctgcttgaacaacctcggaagctggctcggcaggcggttcgagcggacaggatcgatagacgacctaaactgtaggctctcctcgtacgaggaaggttggcgttgtcgtacggcacccccatccgatcgtattcgtctggctcggcaggcagctcagattcgagtctcgcagcgcgactgggaacgctcaagtcatctgctgcagcaggccgtcgaaatcctccccgacatcagcccgcgatggttgaggcataccgacaagcagtacatgcttgcagactttgccggcttggcttcggctgccgctgctactgcccttaatgcgaggaaagatatttatgatgctttacgatttctcgagcttggtcgcggcattattgagaatttgctgatcgaaactcgcggcgacatttccgatcttgcacacaagcaccccggtctagcagagaaattcatctctcttcgggacgagctagactcgccagagaagggccctactgttctgagctctgctgatcagccgtcttcttgggaatcactctcgagacgacgtcgcgaagcggtgcaggaactggacgagctccgatcgcggatccgtgctcagcccggattcgagaactttcatctcccgcccactgccgacgatctgaaagcggcagcagatccaggccctatcatcgtcgtcaacataagcccttaccgttgcgatgcgttcctaatcgagcataatcagattagggtattagaactatccaatctaacggtggaacaaatagcagaacgaaccaaacagttgcaagcagaactgctcgagtggctctgggatgtggttgctcgtccggtgttggacgcactcgggttgaaaaagtccattctcgatgataaatggcctcgtgtgtggtggatcccgacgggactcatgagccagctacctctccacgctgcaggatatcataccaaagaacgctcggagactgtactcgacagggtcatgtcgtctcgcgatgcacgaaacaccgaacctttccgcgaatggtag

SEQ ID NO: 40097 - protein, 362 aa, Muscodor strobelii
  misc_feature: SGI Peptide ID NO. 573967
  misc_feature: Useful for introducing or modulating the production of volatile compounds
ANQAVDATPADHPNRAGCLNNLGSWLGRRFERTGSIDDLNCRLSSYEEGWRCRTAPPSDRIRLARQAAQIRVSQRDWERSSHLLQQAVEILPDISPRWLRHTDKQYMLADFAGLASAAAATALNARKDIYDALRFLELGRGIIENLLIETRGDISDLAHKHPGLAEKFISLRDELDSPEKGPTVLSSADQPSSWESLSRRRREAVQELDELRSRIRAQPGFENFHLPPTADDLKAAADPGPIIVVNISPYRCDAFLIEHNQIRVLELSNLTVEQIAERTKQLQAELLEWLWDVVARPVLDALGLKKSILDDKWPRVWWIPTGLMSQLPLHAAGYHTKERSETVLDRVMSSRDARNTEPFREW

SEQ ID NO: 40098 - DNA, 2697 bp, Muscodor strobelii
  misc_feature: SGI cDNA ID NO. 573968
  misc_feature: Encodes the peptide sequence at SEQ ID NO 40099
atgacgagtgaagctcccgaagacgtgacatcggcctctggcagtgtcgccgagattatcacggaatgcgacgaaaagctggcaacgacggttacagcatcatttccgcccgatgaatggctccagcgcctaaaggcagagtacactgggaagcatgaaactgagacgctaccgcctgggtgtgaccctgaccgaatggcctccgctatcttaactctcaatgaagaggaggcgacccagacactgaaagatctgcttgtaagccaggccgatgatttcacgattgaccgtaggatggtggaccgcatccgacagctcgtgcaaggtcacaaagcatgcgatatcgagcatgatgattgggcctacgagttgtgcaaacttgcgggcctatgccacaattggagcccttacgcagaggtcagggccgtcacgctcccttatgacgatgttgacgagccttgtgaaacctttcgtgcatatctcttggggtacttctgggttgtggtatgtactgccatcaatacattctttgctcctcgccagccaggcatttcgatcccggggtctgttgttcagatcttgttgatgcccatgggacgcgcaatcgcctccttgctccctgactggggctttacctggcggggtcaacgctacacgttgaatcctggtccttggagcagcaaggagcagctgtttgccactgtcatcttttctggcgcatccactatcggcaatgcgactgggcttctagtattaagaatgccggtgttcttcaatcaacgatgggcaaagtacggtttctctgtcatgctagccttggccaatcaggtatatggtcttggacttgcgggcattctgcgccgcctcactgtatacccgatccaagcagtatggccccagatgctgccgacgctggcactcaatcgtacgcttgtcaatggtgacaatagaaatgaaaccattaacggttggaggttgtcgcgctacgttatgttcatatatgctggcattggattcttcgtgtattattggatcccgaatgagttctttacaggaatccgtctcttcaattggatgacatggattgctccgaataacttcaacctagccaccgtgactggctcttacggtggcatggggttcaacccaatctcgagtctggatcccagtgtttccggaatcgacgtcatgaatacaccgttctttgccttactccagcaatacacattgcgggccctttcaggccttgtaattctcatcatgtattatcggaatgctttctggaccggttacatgcccatcaactccaatacagctttcgacaatactagaaaggaatacaatgttaccagggtgcttaatgacaattattcaatcaacatcgacaggtacaaggagtatgggccaccttactataccatctcgaacctattcatcacgggaggcaacttcgtttactacaccttctctgttgtttacgtcttcactaagttctgggcgcagataaagaaggctttcgtggggctagtcgtcaacacgtggaaacgtcgtagcgtttacacgggctttgaagatggtcatactcgaatgatgcgtaagtacaaggaagtaccagagtggtggtacggaatcgttttcgtcttcgggttcgtagtttcgatcgtcgctattacggcttggccaacccaaaccccgtggtggagtatcctaggtgtcaccgccgttggcttcgtgttgactatcccgtgggttatcattgagtccattgcgaacactggcatctcactcaatgtgatctggcaagttctgccaggtgtttggttcccaggtcaaccacttcctcagctgatgcttctcatgctgggagctgcctttgagcaaatggccggcggcttcagcggtgacctcaagtacgcgcactacgccaagataccacccagagccgtctttcgaggccatgtatcgtcggtagttgtcaatgttttcatctattgcgcgatccttgagctgcttctcttgtatgctgggcaggacaacacgctctgctcatgggacaacaagtattaccaggtctgcgcctatgcgcacgcggtatactcgtctacaatctcctttggcgcctttgggactaacaacatgtttaaactctatcctgttcttccatactgcttcctgatcggcgcgctgcttggtgctgtctggatcgctggggagaagggcttccctcgtctattgatttatctacgcactcgactgagtgagaaacactttacatctcttgagaagtatttctggacacccgcttccaagatcctgggaactctcaatcccgcaattgcgttgtctggtgccctccagtggtccggtaatactaatctgtcatatgccacgctaggtatctacctctcatggttcttccagttctatctgaagcgtcgctacactgcgtggtggggcaagtacgcctatctcattttcgcaggatttactgttggagcggctatatccggcctcattgtcaccctcgttttctctttcggtgcagggaagaacgttactgcctttaactggtggggcaacaatgtagcgaaacaaggaattgacaatcaactgtatgtcggaaatgcatcactactaactctcaagagcggtgaaaagtttggcttgttgccagaacaatatccgactgattggtag

SEQ ID NO: 40099 - protein, 898 aa, Muscodor strobelii
  misc_feature: SGI Peptide ID NO. 573968
  misc_feature (154)..(844): Pfam Id: PF03169 Pfam Desc: OPT oligopeptide transporter protein
MTSEAPEDVTSASGSVAEIITECDEKLATTVTASFPPDEWLQRLKAEYTGKHETETLPPGCDPDRMASAILTLNEEEATQTLKDLLVSQADDFTIDRRMVDRIRQLVQGHKACDIEHDDWAYELCKLAGLCHNWSPYAEVRAVTLPYDDVDEPCETFRAYLLGYFWVVVCTAINTFFAPRQPGISIPGSVVQILLMPMGRAIASLLPDWGFTWRGQRYTLNPGPWSSKEQLFATVIFSGASTIGNATGLLVLRMPVFFNQRWAKYGFSVMLALANQVYGLGLAGILRRLTVYPIQAVWPQMLPTLALNRTLVNGDNRNETINGWRLSRYVMFIYAGIGFFVYYWIPNEFFTGIRLFNWMTWIAPNNFNLATVTGSYGGMGFNPISSLDPSVSGIDVMNTPFFALLQQYTLRALSGLVILIMYYRNAFWTGYMPINSNTAFDNTRKEYNVTRVLNDNYSINIDRYKEYGPPYYTISNLFITGGNFVYYTFSVVYVFTKFWAQIKKAFVGLVVNTWKRRSVYTGFEDGHTRMMRKYKEVPEWWYGIVFVFGFVVSIVAITAWPTQTPWWSILGVTAVGFVLTIPWVIIESIANTGISLNVIWQVLPGVWFPGQPLPQLMLLMLGAAFEQMAGGFSGDLKYAHYAKIPPRAVFRGHVSSVVVNVFIYCAILELLLLYAGQDNTLCSWDNKYYQVCAYAHAVYSSTISFGAFGTNNMFKLYPVLPYCFLIGALLGAVWIAGEKGFPRLLIYLRTRLSEKHFTSLEKYFWTPASKILGTLNPAIALSGALQWSGNTNLSYATLGIYLSWFFQFYLKRRYTAWWGKYAYLIFAGFTVGAAISGLIVTLVFSFGAGKNVTAFNWWGNNVAKQGIDNQLYVGNASLLTLKSGEKFGLLPEQYPTDW

SEQ ID NO: 40100 - DNA, 660 bp, Muscodor strobelii
  misc_feature: SGI cDNA ID NO. 573969
  misc_feature: Encodes the peptide sequence at SEQ ID NO 40101
atgcatttcgtctcgctcctcgcgctcggcctcgcctctcaggctacaagcgcccccagcattcctcttgtgtccatgctggaatatgcattcaatccgttcatggcatgcaagaacttcacggatactttcgacgatctgaaacctgacccgatcatccaaaggaatcgtgtcggtcactacaatggcttggactgggaaggctggatttacttcggcacaggtcttgacggaatcacggtgaacggtgtaattcccgaatcctctcctcagattgcagcaaccggaccatcgtcggctctcctgcagattggcgtagtgacactcactccattcggaaacattgtggccaaccctgctaggtcgttcgacctgcacagtttctactttggctgtgtcttcaatcctcaggagaactatttcagcgtcgcgacaggatgtaccatcaccattaccgggttcgacacagaagaggttcagctgccgcctttgactgtggcttatactccatcgaacccgctccgttcccccatgaacttagtcacattgccagactcataccgaaacatcaagaatatcaccgtcggtcttccagtttcacttcccacgccgctgttaacggcactgctggtagatgatgtaaagcattgcaattattaa

SEQ ID NO: 40101 - protein, 219 aa, Muscodor strobelii
  misc_feature: SGI Peptide ID NO. 573969
MHFVSLLALGLASQATSAPSIPLVSMLEYAFNPFMACKNFTDTFDDLKPDPIIQRNRVGHYNGLDWEGWIYFGTGLDGITVNGVIPESSPQIAATGPSSALLQIGVVTLTPFGNIVANPARSFDLHSFYFGCVFNPQENYFSVATGCTITITGFDTEEVQLPPLTVAYTPSNPLRSPMNLVTLPDSYRNIKNITVGLPVSLPTPLLTALLVDDVKHCNY

SEQ ID NO: 40102 - DNA, 948 bp, Muscodor strobelii
  misc_feature: SGI EST ID NO. CUFF.96936.0
  misc_feature: Variant of the nucleotide sequence at SEQ ID NO 40100
tcttcccttgcttttatccgatcatacctgtcttgtggacatatcagaaatatcatcgttccagaagttcatagcgcacttcaataagtccttgctggacaagatgcatttcgtctcgctcctcgcgctcggcctcgcctctcaggctacaagcgcccccagcattcctcttgtgtccatgctggaatatgcattcaatccgttcatggcatgcaagaacttcacggatactttcgacgatctgaaacctgacccgatcatccaaaggaatcgtgtcggtcactacaatggcttggactgggaaggctggatttacttcgtcagtatccgttcaatcgtcaagctagcgtgtcgtcattaacatcaattagggcacaggtcttgacggaatcacggtgaacggtgtaattcccgaatcctctcctcagattgcagcaaccggaccatcgtcggctctcctgcagattggcgtagtgacactcactccattcggaaacattgtggccaaccctgctaggtcgttcgacctgcacagtttctactttggctgtgtcttcaatcctcaggagaactatttcagcgtcgcgacaggatgtaccatcaccattaccgggttcgacacagaagaggttcagctgccgcctttgactgtggcttatactccatcgaacccgctccgttcccccatgaacttagtcacattgccagactcataccgaaacatcaagaatatcaccgtcggtcttccagtttcacttcccacgccgctgttaacggcactgctggtagatgatgtaaagcattgcaattattaattgctgcgtcaagtacgaagtgatattgatatggaacccccacattttttacaaataaggaatgattggtacatggcgtgaagacaattgtgttgcgacgtcacaagctttttcatctctgtgattatttcac

SEQ ID NO: 40103 - DNA, 741 bp, Muscodor strobelii
  misc_feature: SGI cDNA ID NO. 573970
  misc_feature: Encodes the peptide sequence at SEQ ID NO 40104
atggattccaacttggaaccgccgccgtctccaggctccatccaacaaacgcaacgaattgccaaggctgaggcatcgttgaaaacagaggacaagaagcaaatcttcaccgcagtccagaactatcctggcgtcttccaattcgtccaattgctcgtggaggtgtcgcaaaagctggacgtgaacaaacaggagctcctccacatgtgtatccttgagggcatgacagttgtgcataaagctgcgcagtgtgggcgaactgatatcctcaactattgtttccatgaactccacgagcaccctcacgatctgatcaacctcctgagtcgacctgcctggttcggtgatactgcattgcatatagccacggaacatggccatctccacttcctcgagaccttggtcaacacgcttcaccataggggggtcaatgtcaatcttcatgccccgggcgcatgcgataacacgcctcttcactacgcaatcaagtccagacatttcgagatcgcccttcgattgatacaagcccagccccatgatctgaacagtcaaaatcagatgggaaacacggcccttcatctctgcgcggaacataacgctcttcatgtcgcggaggcgctcctcaaatgtagggcatcgccgacgatccggaatacattgcgtaagacacctggtgatgtcgctgatttcaaacgcaattcggtgtacttcttgttccgttcttggggacttgtcaagtga

SEQ ID NO: 40104 - protein, 246 aa, Muscodor strobelii
  misc_feature: SGI Peptide ID NO. 573970
  misc_feature (187)..(219): Pfam Id: PF00023 Pfam Desc: Ankyrin repeat
  misc_feature (153)..(186): Pfam Id: PF00023 Pfam Desc: Ankyrin repeat
  misc_feature (114)..(150): Pfam Id: PF00023 Pfam Desc: Ankyrin repeat
MDSNLEPPPSPGSIQQTQRIAKAEASLKTEDKKQIFTAVQNYPGVFQFVQLLVEVSQKLDVNKQELLHMCILEGMTVVHKAAQCGRTDILNYCFHELHEHPHDLINLLSRPAWFGDTALHIATEHGHLHFLETLVNTLHHRGVNVNLHAPGACDNTPLHYAIKSRHFEIALRLIQAQPHDLNSQNQMGNTALHLCAEHNALHVAEALLKCRASPTIRNTLRKTPGDVADFKRNSVYFLFRSWGLVK

SEQ ID NO: 40105 - DNA, 1767 bp, Muscodor strobelii
  misc_feature: SGI cDNA ID NO. 573971
  misc_feature: Encodes the peptide sequence at SEQ ID NO 40106
atgtggctaatcaacgtcagaacccgagcactcgaggagttcgttggtcgtgatgtccctcaatatgccatcctttcgcacacttgggaggcaggacaagaggtctcgttccaagagatggtacgcgaccaaagcggggacaagaaaggatatcgaaagattgatctaacatgccgacaagccgcacacgatggactggattacgtttgggtcgatacatgctgtattgacaagtcaagtagcgccgagctttcagaagccatcaactccatgttccgttggtacgcgcgcgcaacggtctgttatgtttacttcacagatctcctagaccccatctccgacccatcaaaaggagatgttgagcactgtcgatggttccaccgcacctggactttacaagagcttatcgctcctcgcagtattaagttctattcgcgagactgggacttttgctttactaagtttgaggcttctgaacagctttcacagatcactggtatcgatcttggggtcttgctccacaagacaacattatctcaagtttgtgtagcccagaagatgtcatgggtccgctttcgccaagcttcgcgggtcgaggatgtggcctatagccttttgggcatatttgatattaatatgcccctgctctacggggaggaagagaaagcgttcgtgcggttgcaatccgaaattattcgcacctggcctgatgctagcatcttcgcttggtgcgagaatctctctcttgacacgcctcttggatcacgaggatccacccatgaatcattcagcggcgttttggctacagaccccagcaagttcatcggctgcggacggcttgacaaattaccagacaattccgttgccgatttttccatatcaaatcgaggcatcaagtttcgtgccaaattcggtcttctacgtgtaacacccggccctatttttgttctcccagtctgcctctcctcgggtatgacgtgcgggatcaagatgcgaaacgtcggcgccggctgttttgtcagacaggaaccggaggccctagtgaggttgagtccgcacgagatggcccagcgactcatgtttgatccgtttttgttaacacatattacatcgactgattcgtctcgacggtcaccaaagcaaaggattctacttccgcatcgccactgcgccacgcaggttgctcttgatctcaatcagcagatctaccgccgttggccgtggacacagtgggacgaggttgataggcttttcttcggacccgaagattctgacctcggatgggcaagtttgaaaatagtaagtattccgccatcatatggctatagggcagttgctccatcaagctcggttgacttcttgctctacgtctttggctgggccaaaccaagtagtggagcgcctcgatgttcaatagtcagggtcgagggaacggctagcgaccgatcgttagaagaactaaacgaccaggcagttgcggaaggttggaacagctattgggtggcgaatcgcctcgtgcgcaacaaagtccccgaacaaaccagcatgataatcgccgttgcaggtggtcgcacgctgtctctcaagtgcaaacctgtcatcgtagatgatcttaatatttgtcctagtcccttctggcagatccggcttagctggggccttgcaccttctgaccaagtctcgaagccaataaaccgcggatggaggagaatggactggggctctacatggtcagcaccctgggataatattccgaatacgtcgtag

SEQ ID NO: 40106 - protein, 588 aa, Muscodor strobelii
  misc_feature: SGI Peptide ID NO. 573971
  misc_feature (22)..(134): Pfam Id: PF06985 Pfam Desc: Heterokaryon incompatibility protein (HET)
MWLINVRTRALEEFVGRDVPQYAILSHTWEAGQEVSFQEMVRDQSGDKKGYRKIDLTCRQAAHDGLDYVWVDTCCIDKSSSAELSEAINSMFRWYARATVCYVYFTDLLDPISDPSKGDVEHCRWFHRTWTLQELIAPRSIKFYSRDWDFCFTKFEASEQLSQITGIDLGVLLHKTTLSQVCVAQKMSWVRFRQASRVEDVAYSLLGIFDINMPLLYGEEEKAFVRLQSEIIRTWPDASIFAWCENLSLDTPLGSRGSTHESFSGVLATDPSKFIGCGRLDKLPDNSVADFSISNRGIKFRAKFGLLRVTPGPIFVLPVCLSSGMTCGIKMRNVGAGCFVRQEPEALVRLSPHEMAQRLMFDPFLLTHITSTDSSRRSPKQRILLPHRHCATQVALDLNQQIYRRWPWTQWDEVDRLFFGPEDSDLGWASLKIVSIPPSYGYRAVAPSSSVDFLLYVFGWAKPSSGAPRCSIVRVEGTASDRSLEELNDQAVAEGWNSYWVANRLVRNKVPEQTSMIIAVAGGRTLSLKCKPVIVDDLNICPSPFWQIRLSWGLAPSDQVSKPINRGWRRMDWGSTWSAPWDNIPNTS

SEQ ID NO: 40107 - DNA, 7926 bp, Muscodor strobelii
  misc_feature: SGI EST ID NO. CUFF.96967.0
  misc_feature: Variant of the nucleotide sequence at SEQ ID NO 40105
cacacgatgctttttctgcccctatacgaaatcccaatcatcactgtacctttcaggcctcagttatcgtcctgttgccatagagtcaaacagaatgtcttggatgggactctgattgttcttctagaagactcgcgaagccacatcggaggataccctgaaaagtgataggcagacgagtatgaagatgacatccaacatagatgccaactgtagattgccattcaagattcgctttattggagctgggggcaataaagaaactctcacggagcttcctggaaattgagagtatttgcaagtcgcttcgctttcaggtagaagattatgttattaattccctaaaggtagtgcgcgatctgaactcaaaatgggctggtacacacaatgacaattcgctcgtgattgtagctacgtcccattgtcaatcactgaaattgttgtcccttcattagtaaataccattaaagagtcgtccgctttccacagagacaatcaatcggtcgtcaatcggaagaacacactgacccgcctccaatgccatatgtaacggtctcgacgacttcggcatattggcccttctcggcaaagtctgtcatctttatgctgtattgctcaggccgaagaaggttgagctgacctatgtctatgctctccaacagctaggaagtaagcattcccaacaaccgctcaagtcaccgagctcgtcagatacaaactccaccaattttcgcatacacttcattgcctcgcaagctgtaccttctcacctgcaatccaatcaacgcaagatggattccaacttggaaccgccgccgtctccaggctccatccaacaaacgcaacgaattgccaaggctgaggcatcgttgaaaacagaggacaagaagcaaatcttcaccgcagtccagaactatcctggcgtcttccaattcgtccaattgctcgtggaggtgtcgcaaaagctggacgtgaacaaacaggagctcctccacatgtgtatccttgagggcatgacagttgtgcataaagctgcgcagtgtgggcgaactggtacgttgagtgctctttgcaaggtaaacgattgcttactaacaaaatcgcacccatcagatatcctcaactattgtttccatgaactccacgagcaccctcacgatctgatcaacctcctgagtcgacctgcctggttcggtgatactgcattgcatatagccacggaacatggccatctccacttcctcgagaccttggtcaacacgcttcaccataggggggtcaatgtcaatcttcatgccccgggcgcatgcgataacacgcctcttcactacgcaatcaagtccagacatttcgagatcgcccttcgattgatacaagcccagccccatgatctgaacagtcaaaatcagatgggaaacacggcccttcatctctgcgcggaacataacgctcttcatgtcgcggaggcgctcctcaaatgtagggcatcgccgacgatccggaatacattgcgtaagacacctggtgatgtcgctgatttcaaacgcaattcggtgtacttcttgttccgttcttggggacttgtcaagtgaggtagcgacggatgcgagccatgtgttagcatatcctggagattcgctcgggacggtcagtaagtccctatagaagtcacacgcgaagagttttccacaagacacggctgtgtgcgcatgggctgcgcgtcttcaacggggttggtaaccatgcgttggtaagccgcatacgatgaggggagttggtctcagtaggcttcaactttgcaaactaagatcacgttcccgtgatgttccgtagagccggtagtttgaaatacaggatcgttgctggtattgcgtcggctagtcgaaacgaagtggggttcaccctagaagcccaagggtggcgggatcgaaagacccgccaactgccttacaaaccataatgcatctacaactcaatctatgtggctaatcaacgtcagaacccgagcactcgaggagttcgttggtcgtgatgtccctcaatatgccatcctttcgcacacttgggaggcaggacaagaggtctcgttccaagagatggtacgcgaccaaagcggggacaagaaaggatatcgaaagattgatctaacatgccgacaagccgcacacgatggactggattacgtttgggtcgatacatgctgtattgacaagtcaagtagcgccgagctttcagaagccatcaactccatgttccgttggtacgcgcgcgcaacgctttcacagatcactggtatcgatcttggggtcttgctccacaagacaacattatctcaagtttgtgtagcccagaagatgtcatgggtccgctttcgccaagcttcgcgggtcgaggatgtggcctatagccttttgggcatatttgatattaatatgcccctgctctacggggaggaagagaaagcgttcgtgcggttgcaatccgaaattattcgcacctggcctgatgctagcatcttcgcttggtgcgagaatctctctcttgacacgcctcttggatcacgaggatccacccatgaatcattcagcggcgttttggctacagaccccagcaagttcatcggctgcggacggcttgacaaattaccagacaattccgttgccgatttttccatatcaaatcgaggcatcaagtttcgtgccaaattcggtcttctacgtgtaacacccggccctatttttgttctcccagtctgcctctcctcgggtatgacgtgcgggatcaagatgcgaaacgtcggcgccggctgttttgtcagacaggaaccggaggccctagtgaggttgagtccgcacgagatggcccagcgactcatgtttgatccgtttttgttaacacatattacatcgactgattcgtctcgacggtcaccaaagcaaaggattctacttccgcatcgccactgcgccacgcaggttgctcttgatctcaatcagcagatctaccgccgttggccgtggacacagtgggacgaggttgataggcttttcttcggacccgaagattctgacctcggatgggcaagtttgaaaatagtaagtattccgccatcatatggctatagggcagttgctccatcaagctcggttgacttcttgctctacgtctttggctgggccaaaccaagtagtggagcgcctcgatgttcaatagtcagggtcgagggaacggctagcgaccgatcgttagaagaactaaacgaccaggcagttgcggaaggttggaacagctattgggtggcgaatcgcctcgtgcgcaacaaagtccccgaacaaaccagcatgataatcgccgttgcaggtggtcgcacgctgtctctcaagtgcaaacctgtcatcgtagatgatcttaatatttgtcctagtcccttctggcagatccggcttagctggggccttgcaccttctgaccaagtctcgaagccaataaaccgcggatggaggagaatggactggggctctacatggtcagcaccctgggataatattccgaatacgtcgtaggacgagaaggcagatgaaatgaaataagagcaaatctttcgaaattgacacaaacttgatgaaccgatgggatagtaagcaaagactaatagccaatttgggttcctgttgcctctcagcccatgcaagttctgtcatgaaacgacgacatcatcagctaataatatcataacaggcaaccacccagtgtccatacatgctcatttggctgttcccatcctcttgccagctcctttgtcagcaatatcgcagtatgtctaaaatcacataaaactgaagttggttctcctcttccccaagctgccgggcagttctacccgcatcctcactgcctccagctcagctggataatcataccctactctgacaacgtataactcatgcggtcccccagcatgatatccaactgccgtatctactgcatccaattccgcctttctgaactctgactgcctgttaacgagcttctgggctatcctggctcgccgcctgtagtacagtatcgttgcgcatattgtgaagaatgctattgctgctagtgctatgatgacgatcgtgactgtattaggattgctgcttgagtgcgacttatgactcttatgattggtattgttgttgtgtccatattcatcagttggtgttgtcgcagctgctggcagacttgctggggaggagcctgtcgttctgggctgaggcagtgtagacaaagcattcgaagatgacatgcgagatatcaagcttgacggaagaatgtatgatgatgtttcagatattgcaggtgttctcgttgccgttgaaactgatgtcgaggtgggaatcctgctagtggatacctggaggaaagaattggtcgctgtcttgaatactcgagatgacagggaggaaacagtactgtcagtcgatgtagggactgtcgtagattgccccgtgatgtctctaacaccaccaccaccaacatcaccattgccattgttgttggcaccagtattcttgttgtcattgccgccgatggccccactgctgttgttattgtcattgccgctgccgccgccgctgccgccgcggttgctgccgctgttgttgctagagtcagagattctgctagtttcttcactatcatctgtttttttgttgctctcattccttgtctgattctccccagaagctccatgatcattctctgtctccatacgtgccatacaccattagatgcttgcttgggctcatgcgacttgttcaaaccacaacagtagatcttgcgatggtcttcgatgtcggtactaattagttaccgccggctgttagtatatattgattgtggtctgtgtcgtcaagagcttggtgtgatctacagcgatgcaaatcatagtccaagagaaataagtgaaccagcatgataattcctacggacgcgccgactgggccgtcattcagatcacatcccaaaaattcagtgtacattagcagaagataattgttggtggtctcaaacagatcttgagacggccagagtccgggatgcaacgctcgtcccgagtggccggccaaaggcccaaagtcgaattgcgaccccatctaatcatgtgtcgattgttcgcaaatatgaggacacggtataattagttgtatgaaagtcgctgatgaggtcgacatgacatttgacttccgacacgtcgtgtatcatcctcatcgcgacaactgaatgtcgcagacatgcctgaggactgacaatttcgtcacgggtgaagcaacgttgtttgagataaatttcgacaacgagcactttgaaagatcggtcggcagtcgtcactgcgtaggtgataccgtagggatgccgtactgacgtagcagaaagtatagctgaggctaatacattatggttggcgaatttccggtttctccgtctataacgtctcaatgtctagaccctcaaccttgcctaagaaatcgcctttcgcgcctctaagcaactcgtcgacatcaaccaatccatttgcgatgtacctttcactcacgccagcattcaccctccttgatagtaggtctctaagttctgccctcattgcaccaagctcagctttcgtcaatgcccttgcctcttgctgtttctttttgcgaccatttcctctccctccccaattggcggctttctctagatcgtcgctatcatactcaacacccaattcttctgcggcattccgcatccagtcatcttctttgctgcctttctccttcgccaggctggagtctgcgatcttcttggcgagtgtaacgcggggcttcagccgaccgactagcttccggtccatgtcgagggtctggacgaagaaattcttgcgtgatttcttgctcttttcgtgaacttttgaaatgagacgtcgcgttgggacgacttcttcgggtgcacagagaagtatactaagaccggtctttgtagcacgtgctgtgcgaccggaccgatggacatatgcatccgcggcacgaggaacatgatagtgaacgacgaggtcgacgtcggggatatctagaccacgagcagcaacatctgtagcaataagcacagaagcttgtcctgaaggtgtactggtgaatcgctcaatggatcgaagacgcgccttttgcgccatctgcgaatgaagaggatacgaggtgaggtttaagttttgcaacataggtgcaatacgcctagctgcgctgatagagttcgtgaatacaagtgcccggacgttggggtaaagtaacaatagcgcataaagatagagatcctgtatccaatgttagtaattcctggtatagcatagttcgtgcgctttatcttaccttctccatagcaccacattccaccagaccctctttcaaaccctcggccatttgcgatataggattgacatctatgaactttggcttctcctcgcggaagttcagcttcttaagcaagtattccatggagtcgtcttggctcatcaagttgaacttgccctttccggcaagcttctgctgcagacctttgtggaacgtggcagaaaagacaagcgtctgtctaggacttggctcggcttcgtcctcgtcttcgtcttgctctacgcggtctaatgcggtcagaatctcctcggcctccttgaagtggccttctgtgagcagtctgtctgcctcgtcgactaccagatatgcaatgcccctgaaagaggacatgagttcggtgcttgagctcagaacttcccagaaccgaccaggcgtagcaatgacaatgtcagccttcgccaattggcgttgctgcttgtgcacggagagacctccagtaactgagcagatatacggcgagtttggcagaccattgcagaggttcttgatgtgatcggttagctggtgagcaagttctctcgttggcgacagtatcaaagccaatggagtcttcgtctcctcttctttggtgccatcgtccctcagctccaaccaccgttctacgatgggaataccgaacgcgagggtctttcctgagccggtagaagcctttccgatgacatcatggccggcgagtacttgggggatcgatgctgcttgtataggagtcggtttggcgaatcggagctttgccaaagaggacagtattcctgcagagagatcgagcttggcccactcggttaggtcgatatcgtcttgcgattcatctgcaacgtccagagcggcgaaaatattagattctagctcattgccttccttcacgttcttcgatttgctgctcttctctttctttctttgctctttctgcgacttcgtcggttctgtctcggtattggatttagaggtttcggttggctcttccgtctgggcaggctgggctgcaaccagaggaggtgcgtcatcgtcgtcgtcgtcggcgaatccctcaaactcgtcttcgtcgattatggggcccgctttggttgcgctcccgtcaacttcgtcgtcagcgacagtgattgctcgctgcacattatcagatcagcctgtttgctttgcgtccatctaaacgcgaccgggccatgctcacaaactcaacggtgttgtcgctattccggacgacctcgacatcatcgacctcttccaagccgtagaatccctcggcatcgttgaacatgtcgggcagcttggcattgctccatcgcagcgaatcgacgccgaccgaccgcgtcgtcttcttccttgccttctgcacggcggacgatgttttcgttctcttcgaggctgtggggacaccgccaatgccgagcttcctctttttagccccgttcatgatcgtatgtactcgcgatggcgactttggtgtgattgtggcgagctgtgtcgcagacaagatcggccgagaagtcaaactcgcaagttg

SEQ ID NO: 40108 - DNA, 2250 bp, Muscodor strobelii
  misc_feature: SGI cDNA ID NO. 573972
  misc_feature: Encodes the peptide sequence at SEQ ID NO 40109
atgaacggggctaaaaagaggaagctcggcattggcggtgtccccacagcctcgaagagaacgaaaacatcgtccgccgtgcagaaggcaaggaagaagacgacgcggtcggtcggcgtcgattcgctgcgatggagcaatgccaagctgcccgacatgttcaacgatgccgagggattctacggcttggaagaggtcgatgatgtcgaggtcgtccggaatagcgacaacaccgttgagtttcgagcaatcactgtcgctgacgacgaagttgacgggagcgcaaccaaagcgggccccataatcgacgaagacgagtttgagggattcgccgacgacgacgacgatgacgcacctcctctggttgcagcccagcctgcccagacggaagagccaaccgaaacctctaaatccaataccgagacagaaccgacgaagtcgcagaaagagcaaagaaagaaagagaagagcagcaaatcgaagaacgtgaaggaaggcaatgagctagaatctaatattttcgccgctctggacgttgcagatgaatcgcaagacgatatcgacctaaccgagtgggccaagctcgatctctctgcaggaatactgtcctctttggcaaagctccgattcgccaaaccgactcctatacaagcagcatcgatcccccaagtactcgccggccatgatgtcatcggaaaggcttctaccggctcaggaaagaccctcgcgttcggtattcccatcgtagaacggtggttggagctgagggacgatggcaccaaagaagaggagacgaagactccattggctttgatactgtcgccaacgagagaacttgctcaccagctaaccgatcacatcaagaacctctgcaatggtctgccaaactcgccgtatatctgctcagttactggaggtctctccgtgcacaagcagcaacgccaattggcgaaggctgacattgtcattgctacgcctggtcggttctgggaagttctgagctcaagcaccgaactcatgtcctctttcaggggcattgcatatctggtagtcgacgaggcagacagactgctcacagaaggccacttcaaggaggccgaggagattctgaccgcattagaccgcgtagagcaagacgaagacgaggacgaagccgagccaagtcctagacagacgcttgtcttttctgccacgttccacaaaggtctgcagcagaagcttgccggaaagggcaagttcaacttgatgagccaagacgactccatggaatacttgcttaagaagctgaacttccgcgaggagaagccaaagttcatagatgtcaatcctatatcgcaaatggccgagggtttgaaagagggtctggtggaatgtggtgctatggagaaggatctctatctttatgcgctattgttactttaccccaacgtccgggcacttgtattcacgaactctatcagcgcagctaggcgtattgcacctatgttgcaaaacttaaacctcacctcgtatcctcttcattcgcagatggcgcaaaaggcgcgtcttcgatccattgagcgattcaccagtacaccttcaggacaagcttctgtgcttattgctacagatgttgctgctcgtggtctagatatccccgacgtcgacctcgtcgttcactatcatgttcctcgtgccgcggatgcatatgtccatcggtccggtcgcacagcacgtgctacaaagaccggtcttagtatacttctctgtgcacccgaagaagtcgtcccaacgcgacgtctcatttcaaaagttcacgaaaagagcaagaaatcacgcaagaatttcttcgtccagaccctcgacatggaccggaagctagtcggtcggctgaagccccgcgttacactcgccaagaagatcgcagactccagcctggcgaaggagaaaggcagcaaagaagatgactggatgcggaatgccgcagaagaattgggtgttgagtatgatagcgacgatctagagaaagccgccaattggggagggagaggaaatggtcgcaaaaagaaacagcaagaggcaagggcattgacgaaagctgagcttggtgcaatgagggcagaacttagagacctactatcaaggagggtgaatgctggcgtgagtgaaaggtacatcgcaaatggattggttgatgtcgacgagttgcttagaggcgcgaaaggcgatttcttaggcaaggttgagggtctagacattgagacgttatag

SEQ ID NO: 40109 - protein, 749 aa, Muscodor strobelii
  misc_feature: SGI Peptide ID NO. 573972
  misc_feature (214)..(407): Pfam Id: PF00270 Pfam Desc: DEAD/DEAH box helicase
  misc_feature (495)..(574): Pfam Id: PF00271 Pfam Desc: Helicase conserved C-terminal domain
MNGAKKRKLGIGGVPTASKRTKTSSAVQKARKKTTRSVGVDSLRWSNAKLPDMFNDAEGFYGLEEVDDVEVVRNSDNTVEFRAITVADDEVDGSATKAGPIIDEDEFEGFADDDDDDAPPLVAAQPAQTEEPTETSKSNTETEPTKSQKEQRKKEKSSKSKNVKEGNELESNIFAALDVADESQDDIDLTEWAKLDLSAGILSSLAKLRFAKPTPIQAASIPQVLAGHDVIGKASTGSGKTLAFGIPIVERWLELRDDGTKEEETKTPLALILSPTRELAHQLTDHIKNLCNGLPNSPYICSVTGGLSVHKQQRQLAKADIVIATPGRFWEVLSSSTELMSSFRGIAYLVVDEADRLLTEGHFKEAEEILTALDRVEQDEDEDEAEPSPRQTLVFSATFHKGLQQKLAGKGKFNLMSQDDSMEYLLKKLNFREEKPKFIDVNPISQMAEGLKEGLVECGAMEKDLYLYALLLLYPNVRALVFTNSISAARRIAPMLQNLNLTSYPLHSQMAQKARLRSIERFTSTPSGQASVLIATDVAARGLDIPDVDLVVHYHVPRAADAYVHRSGRTARATKTGLSILLCAPEEVVPTRRLISKVHEKSKKSRKNFFVQTLDMDRKLVGRLKPRVTLAKKIADSSLAKEKGSKEDDWMRNAAEELGVEYDSDDLEKAANWGGRGNGRKKKQQEARALTKAELGAMRAELRDLLSRRVNAGVSERYIANGLVDVDELLRGAKGDFLGKVEGLDIETL

SEQ ID NO: 40110 - DNA, 8148 bp, Muscodor strobelii
  misc_feature: SGI EST ID NO. CUFF.96968.1
  misc_feature: Variant of the nucleotide sequence at SEQ ID NO 40108
caacttgcgagtttgacttctcggccgatcttgtctgcgacacagctcgccacaatcacaccaaagtcgccatcgcgagtacatacgatcatgaacggggctaaaaagaggaagctcggcattggcggtgtccccacagcctcgaagagaacgaaaacatcgtccgccgtgcagaaggcaaggaagaagacgacgcggtcggtcggcgtcgattcgctgcgatggagcaatgccaagctgcccgacatgttcaacgatgccgagggattctacggcttggaagaggtcgatgatgtcgaggtcgtccggaatagcgacaacaccgttgagtttcgagcaatcactgtcgctgacgacgaagttgacgggagcgcaaccaaagcgggccccataatcgacgaagacgagtttgagggattcgccgacgacgacgacgatgacgcacctcctctggttgcagcccagcctgcccagacggaagagccaaccgaaacctctaaatccaataccgagacagaaccgacgaagtcgcagaaagagcaaagaaagaaagagaagagcagcaaatcgaagaacgtgaaggaaggcaatgagctagaatctaatattttcgccgctctggacgttgcagatgaatcgcaagacgatatcgacctaaccgagtgggccaagctcgatctctctgcaggaatactgtcctctttggcaaagctccgattcgccaaaccgactcctatacaagcagcatcgatcccccaagtactcgccggccatgatgtcatcggaaaggcttctaccggctcaggaaagaccctcgcgttcggtattcccatcgtagaacggtggttggagctgagggacgatggcaccaaagaagaggagacgaagactccattggctttgatactgtcgccaacgagagaacttgctcaccagctaaccgatcacatcaagaacctctgcaatggtctgccaaactcgccgtatatctgctcagttactggaggtctctccgtgcacaagcagcaacgccaattggcgaaggctgacattgtcattgctacgcctggtcggttctgggaagttctgagctcaagcaccgaactcatgtcctctttcaggggcattgcatatctggtagtcgacgaggcagacagactgctcacagaaggccacttcaaggaggccgaggagattctgaccgcattagaccgcgtagagcaagacgaagacgaggacgaagccgagccaagtcctagacagacgcttgtcttttctgccacgttccacaaaggtctgcagcagaagcttgccggaaagggcaagttcaacttgatgagccaagacgactccatggaatacttgcttaagaagctgaacttccgcgaggagaagccaaagttcatagatgtcaatcctatatcgcaaatggccgagggtttgaaagagggtctggtggaatgtggtgctatggagaaggatctctatctttatgcgctattgttactttaccccaacgtccgggcacttgtattcacgaactctatcagcgcagctaggcgtattgcacctatgttgcaaaacttaaacctcacctcgtatcctcttcattcgcagatggcgcaaaaggcgcgtcttcgatccattgagcgattcaccagtacaccttcaggacaagcttctgtgcttattgctacagatgttgctgctcgtggtctagatatccccgacgtcgacctcgtcgttcactatcatgttcctcgtgccgcggatgcatatgtccatcggtccggtcgcacagcacgtgctacaaagaccggtcttagtatacttctctgtgcacccgaagaagtcgtcccaacgcgacgtctcatttcaaaagttcacgaaaagagcaagaaatcacgcaagaatttcttcgtccagaccctcgacatggaccggaagctagtcggtcggctgaagccccgcgttacactcgccaagaagatcgcagactccagcctggcgaaggagaaaggcagcaaagaagatgactggatgcggaatgccgcagaagaattgggtgttgagtatgatagcgacgatctagagaaagccgccaattggggagggagaggaaatggtcgcaaaaagaaacagcaagaggcaagggcattgacgaaagctgagcttggtgcaatgagggcagaacttagagacctactatcaaggagggtgaatgctggcgtgagtgaaaggtacatcgcaaatggattggttgatgtcgacgagttgcttagaggcgcgaaaggcgatttcttaggcaaggttgagggtctagacattgagacgttatagacggagaaaccggaaattcgccaaccataatgtattagcctcagctatactttctgctacgtcagtacggcatccctacggtatcacctacgcagtgacgactgccgaccgatctttcaaagtgctcgttgtcgaaatttatctcaaacaacgttgcttcacccgtgacgaaattgtcagtcctcaggcatgtctgcgacattcagttgtcgcgatgaggatgatacacgacgtgtcggaagtcaaatgtcatgtcgacctcatcagcgactttcatacaactaattataccgtgtcctcatatttgcgaacaatcgacacatgattagatggggtcgcaattcgactttgggcctttggccggccactcgggacgagcgttgcatcccggactctggccgtctcaagatctgtttgagaccaccaacaattatcttctgctaatgtacactgaatttttgggatgtgatctgaatgacggcccagtcggcgcgtccgtaggaattatcatgctggttcacttatttctcttggactatgatttgcatcgctgtagatcacaccaagctcttgacgacacagaccacaatcaatatatactaacagccggcggtaactaattagtaccgacatcgaagaccatcgcaagatctactgttgtggtttgaacaagtcgcatgagcccaagcaagcatctaatggtgtatggcacgtatggagacagagaatgatcatggagcttctggggagaatcagacaaggaatgagagcaacaaaaaaacagatgatagtgaagaaactagcagaatctctgactctagcaacaacagcggcagcaaccgcggcggcagcggcggcggcagcggcaatgacaataacaacagcagtggggccatcggcggcaatgacaacaagaatactggtgccaacaacaatggcaatggtgatgttggtggtggtggtgttagagacatcacggggcaatctacgacagtccctacatcgactgacagtactgtttcctccctgtcatctcgagtattcaagacagcgaccaattctttcctccaggtatccactagcaggattcccacctcgacatcagtttcaacggcaacgagaacacctgcaatatctgaaacatcatcatacattcttccgtcaagcttgatatctcgcatgtcatcttcgaatgctttgtctacactgcctcagcccagaacgacaggctcctccccagcaagtctgccagcagctgcgacaacaccaactgatgaatatggacacaacaacaataccaatcataagagtcataagtcgcactcaagcagcaatcctaatacagtcacgatcgtcatcatagcactagcagcaatagcattcttcacaatatgcgcaacgatactgtactacaggcggcgagccaggatagcccagaagctcgttaacaggcagtcagagttcagaaaggcggaattggatgcagtagatacggcagttggatatcatgctgggggaccgcatgagttatacgttgtcagagtagggtatgattatccagctgagctggaggcagtgaggatgcgggtagaactgcccggcagcttggggaagaggagaaccaacttcagttttatgtgattttagacatactgcgatattgctgacaaaggagctggcaagaggatgggaacagccaaatgagcatgtatggacactgggtggttgcctgttatgatattattagctgatgatgtcgtcgtttcatgacagaacttgcatgggctgagaggcaacaggaacccaaattggctattagtctttgcttactatcccatcggttcatcaagtttgtgtcaatttcgaaagatttgctcttatttcatttcatctgccttctcgtcctacgacgtattcggaatattatcccagggtgctgaccatgtagagccccagtccattctcctccatccgcggtttattggcttcgagacttggtcagaaggtgcaaggccccagctaagccggatctgccagaagggactaggacaaatattaagatcatctacgatgacaggtttgcacttgagagacagcgtgcgaccacctgcaacggcgattatcatgctggtttgttcggggactttgttgcgcacgaggcgattcgccacccaatagctgttccaaccttccgcaactgcctatgatacagttggagtcagtcattactgtctttggaatattctaggagtgaagtggccccttgtgagtgtttagttttaattgtgtcgagagagaatcaaagcaatcgattcccaagtcttgtcccgtggggaaaagagagactccgcatgcttacctggtcgtttagttcttctaacgatcggtcgctagccgttccctcgaccctgactattgaacatcgaggcgctccactacttggtttggcccagccaaagacgtagagcaagaagtcaaccgagcttgatggagcaactgccctatagccatatgatggcggaatacttactattttcaaacttgcccatccgaggtcagaatcttcgggtccgaagaaaagcctatcaacctcgtcccactgtgtccacggccaacggcggtagatctgctgattgagatcaagagcaacctgcgtggcgcagtggcgatgcggaagtagaatcctttgctttggtgaccgtcgagacgaatcagtcgatgtaatatgtgttaacaaaaacggatcaaacatgagtcgctgggccatctcgtgcggactcaacctcactagggcctccggttcctgtctgacaaaacagccggcgccgacgtttcgcatcttgatcccgcacgtcatacccgaggagaggcagactgggagaacaaaaatagggccgggtgttacacgtagaagaccgaatttggcacgaaacttgatgcctcgatttgatatggaaaaatcggcaacggaattgtctggtaatttgtcaagccgtccgcagccgatgaacttgctggggtctgtagccaaaacgccgctgaatgattcatgggtggatcctcgtgatccaagaggcgtgtcaagagagagattctcgcaccaagcgaagatgctagcatcaggccaggtgcgaataatttcggattgcaaccgcacgaacgctttctcttcctccccgtagagcaggggcatattaatatcaaatatgcccaaaaggctataggccacatcctcgacccgcgaagcttggcgaaagcggacccatgacatcttctgggctacacaaacttgagataatgttgtcttgtggagcaagaccccaagatcgataccagtgatctgtgaaagctgttcagaagcctcaaacttagtaaagcaaaagtcccagtctcgcgaatagaacttaatactgcgaggagcgataagctcttgtaaagtccaggtgcggtggaaccatcgacagtgctcaacatctccttttgatgggtcggagatggggtctaggagatctgtgaagtaaacataacagaccgttgcgcgcgcgtaccaacggaacatggagttgatggcttctgaaagctcggcgctacttgacttgtcaatacagcatgtatcgacccaaacgtaatccagtccatcgtgtgcggcttgtcggcatgttagatcaatctttcgatatcctttcttgtccccgctttggtcgcgtaccatctcttggaacgagacctcttgtcctgcctcccaagtgtgcgaaaggatggcatattgagggacatcacgaccaacgaactcctcgagtgctcgggttctgacgttgattagccacatagattgagttgtagatgcattatggtttgtaaggcagttggcgggtctttcgatcccgccacccttgggcttctagggtgaaccccacttcgtttcgactagccgacgcaataccagcaacgatcctgtatttcaaactaccggctctacggaacatcacgggaacgtgatcttagtttgcaaagttgaagcctactgagaccaactcccctcatcgtatgcggcttaccaacgcatggttaccaaccccgttgaagacgcgcagcccatgcgcacacagccgtgtcttgtggaaaactcttcgcgtgtgacttctatagggacttactgaccgtcccgagcgaatctccaggatatgctaacacatggctcgcatccgtcgctacctcacttgacaagtccccaagaacggaacaagaagtacaccgaattgcgtttgaaatcagcgacatcaccaggtgtcttacgcaatgtattccggatcgtcggcgatgccctacatttgaggagcgcctccgcgacatgaagagcgttatgttccgcgcagagatgaagggccgtgtttcccatctgattttgactgttcagatcatggggctgggcttgtatcaatcgaagggcgatctcgaaatgtctggacttgattgcgtagtgaagaggcgtgttatcgcatgcgcccggggcatgaagattgacattgacccccctatggtgaagcgtgttgaccaaggtctcgaggaagtggagatggccatgttccgtggctatatgcaatgcagtatcaccgaaccaggcaggtcgactcaggaggttgatcagatcgtgagggtgctcgtggagttcatggaaacaatagttgaggatatctgatgggtgcgattttgttagtaagcaatcgtttaccttgcaaagagcactcaacgtaccagttcgcccacactgcgcagctttatgcacaactgtcatgccctcaaggatacacatgtggaggagctcctgtttgttcacgtccagcttttgcgacacctccacgagcaattggacgaattggaagacgccaggatagttctggactgcggtgaagatttgcttcttgtcctctgttttcaacgatgcctcagccttggcaattcgttgcgtttgttggatggagcctggagacggcggcggttccaagttggaatccatcttgcgttgattggattgcaggtgagaaggtacagcttgcgaggcaatgaagtgtatgcgaaaattggtggagtttgtatctgacgagctcggtgacttgagcggttgttgggaatgcttacttcctagctgttggagagcatagacataggtcagctcaaccttcttcggcctgagcaatacagcataaagatgacagactttgccgagaagggccaatatgccgaagtcgtcgagaccgttacatatggcattggaggcgggtcagtgtgttcttccgattgacgaccgattgattgtctctgtggaaagcggacgactctttaatggtatttactaatgaagggacaacaatttcagtgattgacaatgggacgtagctacaatcacgagcgaattgtcattgtgtgtaccagcccattttgagttcagatcgcgcactacctttagggaattaataacataatcttctacctgaaagcgaagcgacttgcaaatactctcaatttccaggaagctccgtgagagtttctttattgcccccagctccaataaagcgaatcttgaatggcaatctacagttggcatctatgttggatgtcatcttcatactcgtctgcctatcacttttcagggtatcctccgatgtggcttcgcgagtcttctagaagaacaatcagagtcccatccaagacattctgtttgactctatggcaacaggacgataactgaggcctgaaaggtacagtgatgattgggatttcgtataggggcagaaaaagcatcgtgtg

SEQ ID NO: 40111 - DNA, 2265 bp, Muscodor strobelii
  misc_feature: SGI cDNA ID NO. 573973
  misc_feature: Encodes the peptide sequence at SEQ ID NO 40112
atgaacggggctaaaaagaggaagctcggcattggcggtgtccccacagcctcgaagagaacgaaaacatcgtccgccgtgcagaaggcaaggaagaagacgacgcggtcggtcggcgtcgattcgctgcgatggagcaatgccaagctgcccgacatgttcaacgatgccgagggattctacggcttggaagaggtcgatgatgtcgaggtcgtccggaatagcgacaacaccgttgagtttgtgagcatggcccggtcgccaatcactgtcgctgacgacgaagttgacgggagcgcaaccaaagcgggccccataatcgacgaagacgagtttgagggattcgccgacgacgacgacgatgacgcacctcctctggttgcagcccagcctgcccagacggaagagccaaccgaaacctctaaatccaataccgagacagaaccgacgaagtcgcagaaagagcaaagaaagaaagagaagagcagcaaatcgaagaacgtgaaggaaggcaatgagctagaatctaatattttcgccgctctggacgttgcagatgaatcgcaagacgatatcgacctaaccgagtgggccaagctcgatctctctgcaggaatactgtcctctttggcaaagctccgattcgccaaaccgactcctatacaagcagcatcgatcccccaagtactcgccggccatgatgtcatcggaaaggcttctaccggctcaggaaagaccctcgcgttcggtattcccatcgtagaacggtggttggagctgagggacgatggcaccaaagaagaggagacgaagactccattggctttgatactgtcgccaacgagagaacttgctcaccagctaaccgatcacatcaagaacctctgcaatggtctgccaaactcgccgtatatctgctcagttactggaggtctctccgtgcacaagcagcaacgccaattggcgaaggctgacattgtcattgctacgcctggtcggttctgggaagttctgagctcaagcaccgaactcatgtcctctttcaggggcattgcatatctggtagtcgacgaggcagacagactgctcacagaaggccacttcaaggaggccgaggagattctgaccgcattagaccgcgtagagcaagacgaagacgaggacgaagccgagccaagtcctagacagacgcttgtcttttctgccacgttccacaaaggtctgcagcagaagcttgccggaaagggcaagttcaacttgatgagccaagacgactccatggaatacttgcttaagaagctgaacttccgcgaggagaagccaaagttcatagatgtcaatcctatatcgcaaatggccgagggtttgaaagagggtctggtggaatgtggtgctatggagaaggatctctatctttatgcgctattgttactttaccccaacgtccgggcacttgtattcacgaactctatcagcgcagctaggcgtattgcacctatgttgcaaaacttaaacctcacctcgtatcctcttcattcgcagatggcgcaaaaggcgcgtcttcgatccattgagcgattcaccagtacaccttcaggacaagcttctgtgcttattgctacagatgttgctgctcgtggtctagatatccccgacgtcgacctcgtcgttcactatcatgttcctcgtgccgcggatgcatatgtccatcggtccggtcgcacagcacgtgctacaaagaccggtcttagtatacttctctgtgcacccgaagaagtcgtcccaacgcgacgtctcatttcaaaagttcacgaaaagagcaagaaatcacgcaagaatttcttcgtccagaccctcgacatggaccggaagctagtcggtcggctgaagccccgcgttacactcgccaagaagatcgcagactccagcctggcgaaggagaaaggcagcaaagaagatgactggatgcggaatgccgcagaagaattgggtgttgagtatgatagcgacgatctagagaaagccgccaattggggagggagaggaaatggtcgcaaaaagaaacagcaagaggcaagggcattgacgaaagctgagcttggtgcaatgagggcagaacttagagacctactatcaaggagggtgaatgctggcgtgagtgaaaggtacatcgcaaatggattggttgatgtcgacgagttgcttagaggcgcgaaaggcgatttcttaggcaaggttgagggtctagacattgagacgttatag

SEQ ID NO: 40112 - protein, 754 aa, Muscodor strobelii
  misc_feature: SGI Peptide ID NO. 573973
  misc_feature (219)..(412): Pfam Id: PF00270 Pfam Desc: DEAD/DEAH box helicase
  misc_feature (500)..(579): Pfam Id: PF00271 Pfam Desc: Helicase conserved C-terminal domain
MNGAKKRKLGIGGVPTASKRTKTSSAVQKARKKTTRSVGVDSLRWSNAKLPDMFNDAEGFYGLEEVDDVEVVRNSDNTVEFVSMARSPITVADDEVDGSATKAGPIIDEDEFEGFADDDDDDAPPLVAAQPAQTEEPTETSKSNTETEPTKSQKEQRKKEKSSKSKNVKEGNELESNIFAALDVADESQDDIDLTEWAKLDLSAGILSSLAKLRFAKPTPIQAASIPQVLAGHDVIGKASTGSGKTLAFGIPIVERWLELRDDGTKEEETKTPLALILSPTRELAHQLTDHIKNLCNGLPNSPYICSVTGGLSVHKQQRQLAKADIVIATPGRFWEVLSSSTELMSSFRGIAYLVVDEADRLLTEGHFKEAEEILTALDRVEQDEDEDEAEPSPRQTLVFSATFHKGLQQKLAGKGKFNLMSQDDSMEYLLKKLNFREEKPKFIDVNPISQMAEGLKEGLVECGAMEKDLYLYALLLLYPNVRALVFTNSISAARRIAPMLQNLNLTSYPLHSQMAQKARLRSIERFTSTPSGQASVLIATDVAARGLDIPDVDLVVHYHVPRAADAYVHRSGRTARATKTGLSILLCAPEEVVPTRRLISKVHEKSKKSRKNFFVQTLDMDRKLVGRLKPRVTLAKKIADSSLAKEKGSKEDDWMRNAAEELGVEYDSDDLEKAANWGGRGNGRKKKQQEARALTKAELGAMRAELRDLLSRRVNAGVSERYIANGLVDVDELLRGAKGDFLGKVEGLDIETL

SEQ ID NO: 40113 - DNA, 8148 bp, Muscodor strobelii; identical to SEQ ID NO: 40110
  misc_feature: SGI EST ID NO. CUFF.96968.1
  misc_feature: Variant of the nucleotide sequence at SEQ ID NO 40111

SEQ ID NO: 40114 - DNA, 1194 bp, Muscodor strobelii
  misc_feature: SGI cDNA ID NO. 573974
  misc_feature: Encodes the peptide sequence at SEQ ID NO 40115
atggggaagtcatccaaggacaagcgtgacgcttattacagacttgcgaaagagcaagggtggcgggcgcggagtgccttcaagctcttgcaacttgatgaagaattcgacttatttgccaatatcactcgcgtggtcgacttgtgtgcagctccaggaagctggtcgcaggtcctttccagggtcttgatcaagggtgagaaatttgggcgtgccgcatgggaggatagagaggccaagtttcgccagcaaatgctaggcgtgttcggctccacgaaatcacctacgacgactacagtaactgaagtcagagagctgcgagatctgaagcctcgagacgatgtcaagattgtatctatcgacctacagccgatttctcctcttccgggcatcataacactgagagctgacatcacgcatcccgcaacggtgcccctgctgctaaaagccttggaccctgactacgatcccaaaacgaactcccaacaggctgctcaccccgtggatctggtcattagcgatggcgctcccgatgttactggattgcacgatttggacatctacgtgcaatcccagcttctcttcgccgctctcaatctggctctctgcgttctcaagccgggcggcacctttgtcgccaagatcttcaggggcaagaacgtcgacattctctatgcgcagctgaaaatattcttcgagcgagtccatgtcgcaaagccgagatcatcgcgcgccagcagcgtcgaagccttcatcgtgtgtttgaattttcaacctcccaaggggttttcagcgagtcttgaagagcctcttggcattggatatcgacttgataagatgacggaggagaatacaatgagcgcacctatcagtgcgacaactatactccaaaatcaggagacaggtgcttggaactccggtccctgcacgccccagactacagatgagcacggtgttacagaagtagagccggtagactgccgtccgcgaaaaggcaacggagctcgatggatagcgccattcattgcttgtggtgatttatcagcttttgactcagacgcctcataccgactaccaccagatcacgtttcgctcgacccagttcaaccacctaccgcaccaccatacaagcgggcactcgagatgcgacgagcacacggaggcgcatacgggaagactggtcccaaagcgtga

SEQ ID NO: 40115 - protein, 397 aa, Muscodor strobelii
  misc_feature: SGI Peptide ID NO. 573974
  misc_feature (21)..(259): Pfam Id: PF01728 Pfam Desc: FtsJ-like methyltransferase
  misc_feature (116)..(259): Pfam Id: PF01728 Pfam Desc: FtsJ-like methyltransferase
  misc_feature (21)..(61): Pfam Id: PF01728 Pfam Desc: FtsJ-like methyltransferase
MGKSSKDKRDAYYRLAKEQGWRARSAFKLLQLDEEFDLFANITRVVDLCAAPGSWSQVLSRVLIKGEKFGRAAWEDREAKFRQQMLGVFGSTKSPTTTTVTEVRELRDLKPRDDVKIVSIDLQPISPLPGIITLRADITHPATVPLLLKALDPDYDPKTNSQQAAHPVDLVISDGAPDVTGLHDLDIYVQSQLLFAALNLALCVLKPGGTFVAKIFRGKNVDILYAQLKIFFERVHVAKPRSSRASSVEAFIVCLNFQPPKGFSASLEEPLGIGYRLDKMTEENTMSAPISATTILQNQETGAWNSGPCTPQTTDEHGVTEVEPVDCRPRKGNGARWIAPFIACGDLSAFDSDASYRLPPDHVSLDPVQPPTAPPYKRALEMRRAHGGAYGKTGPKA

SEQ ID NO: 40116 - DNA, 2500 bp, Muscodor strobelii
  misc_feature: SGI EST ID NO. CUFF.96959.0
  misc_feature: Variant of the nucleotide sequence at SEQ ID NO 40114
caccatcgctcccatccaccgccttagttcagtcctcattgacaggaaattttacaccgaggacatctcaatctcatttcattccaagagtctcatctcattcttactcactttattcctttagacaaattcgaccatggggaagtcatccaaggacaagcgtgacgcttattacagacttgcgaaagagcaagggtggcgggcgcggagtgccttcaagctcttgcaacttgatgaagaattcgacttatttgccaatatcactcgcgtggtcgacttgtgtgcagctccaggaagctggtcgcaggtcctttccagggtcttgatcaagggtgagaaatttgggcgtgccgcatgggaggatagagaggccaagtttcgccagcaaatgctaggcgtgttcggctccacgaaatcacctacgacgactacagtaactgaagtcagagagctgcgagatctgaagcctcgagacgatgtcaagattgtatctatcgacctacagccgatttctcctcttccgggcatcataacactgagagctgacatcacgcatcccgcaacggtgcccctgctgctaaaagccttggaccctgactacgatcccaaaacgaactcccaacaggctgctcaccccgtggatctggtcattagcgatggcgctcccgatgttactggattgcacgatttggacatctacgtgcaatcccagcttctcttcgccgctctcaatctggctctctgcgttctcaagccgggcggcacctttgtcgccaagatcttcaggggcaagaacgtcgacattctctatgcgcagctgaaaatattcttcgagcgagtccatgtcgcaaagccgagatcatcgcgcgccagcagcgtcgaagccttcatcgtgtgtttgaattttcaacctcccaaggggttttcagcgagtcttgaagagcctcttggcattggatatcgacttgataagatgacggaggagaatacaatgagcgcacctatcagtgcgacaactatactccaaaatcaggagacaggtgcttggaactccggtccctgcacgccccagactacagatgagcacggtgttacagaagtagagccggtagactgccgtccgcgaaaaggcaacggagctcgatggatagcgccattcattgcttgtggtgatttatcagcttttgactcagacgcctcataccgactaccaccagatcacgtttcgctcgacccagttcaaccacctaccgcaccaccatacaagcgggcactcgagatgcgacgagcacacggaggcgcatacgggaagactggtcccaaagcgtgaaaatcatctcgcgaagtttgcattacgaaatttacagtctgatcagtgccgctcagccgctggtccccagactgtctgcattgacacgcttcccttgctttcctcccactcctctgccccaagtatcttcttatacagactatttgcggtagacgtcacaagcaaaaagcggcgtctggtagccgcagtggcgttgcagcacctactacaatgaagttagtacgatgtcttgggaaaataactcgtttgggatctttctacacttgccagatggggccaggacttgagtacctcgtccagacattctatcaaccagcgtccgagcccgttgccttgcaactcaggcaacacgtaaacgtccgtaagatacgcaaacgtcacatcatccgtgataactctcgcgaggccgacttgtctcgggctgctctggcctatatatctgttagcacgacatccaagccggtagtggaacgccgtgatagccggacctgcgatctctgaagttgatttcggcaattcatagagcccaaagcataatgaattacgaagcatcttctctacggcttcccttggcgctgcttttgtccacgacatgatgtcggaggccatcacctcatgcaccacgtcgacatcaatgagcttctgttccgtagagaccaagtacccctcacggtaccagtttctgggttcgatttcgaggaccatcgtggatgatgctgtattgtcacgcgttattgggcgtaatgctggaaaggtagtttgtacgacatctatattcggccttctaggctcatgcatgcgcaaacgcaagtcgttatatacccgtaatcaagtatcgtcgtttcgctcaagctgttgaagtgtcgtgtacatgcccaaacgaactaagtcatcttcgtcatggagctccacacacagttcacgccaagagcttcaacttcatcggatatacctaccgtaatcgggtttccacatgcatgaaacatctgggtttatttgagccactgatggcggttgatgcgtcactcgtcgttccacaataccatacgaatggaagcaatgcacgttcttgtcacatctgaagagtcactgagtgacacctcgatcaagctctatctccgagcccaccgatttcgctccactgactgccaagtcctgtgcaagtcaacg

SEQ ID NO: 40117 - DNA, 432 bp, Muscodor strobelii
  misc_feature: SGI cDNA ID NO. 573975
  misc_feature: Encodes the peptide sequence at SEQ ID NO 40118
atggtcctcgaaatcgaacccagaaactggtaccgtgaggggtacttggtctctacggaacagaagctcattgatgtcgacgtggtgcatgaggtgatggcctccgacatcatgtcgtggacaaaagcagcgccaagggaagccgtagagaagatgcttcgtaattcattatgctttgggctctatgaattgccgaaatcaacttcagagatcgcaggccagagcagcccgagacaagtcggcctcgcgagagttatcacggatgatgtgacgtttgcgtatcttacggacgtttacgtgttgcctgagttgcaaggcaacgggctcggacgctggttgatagaatgtctggacgaggtactcaagtcctggccccatctggcaagtgtagaaagatcccaaacgagttattttcccaagacatcgtactaa

SEQ ID NO: 40118 - protein, 143 aa, Muscodor strobelii
  misc_feature: SGI Peptide ID NO. 573975
  misc_feature (71)..(124): Pfam Id: PF00583 Pfam Desc: Acetyltransferase (GNAT) family
MVLEIEPRNWYREGYLVSTEQKLIDVDVVHEVMASDIMSWTKAAPREAVEKMLRNSLCFGLYELPKSTSEIAGQSSPRQVGLARVITDDVTFAYLTDVYVLPELQGNGLGRWLIECLDEVLKSWPHLASVERSQTSYFPKTSY

SEQ ID NO: 40119 - DNA, 2292 bp, Muscodor strobelii
  misc_feature: SGI EST ID NO. CUFF.96960.1
  misc_feature: Variant of the nucleotide sequence at SEQ ID NO 40117
gacttggcagtcagtggagcgaaatcggtgggctcggagatagagcttgatcgaggtgtcactcagtgactcttcagatgtgacaagaacgtgcattgcttccattcgtatggtattgtggaacgacgagtgacgcatcaaccgccatcagtggctcaaataaacccagatgtttcatgcatgtggaaacccgattacggtaggtatatccgatgaagttgaagctcttggcgtgaactgtgtgtggagctccatgacgaagatgacttagttcgtttgggcatgtacacgacacttcaacagcttgagcgaaacgacgatacttgattacgggtatataacgacttgcgtttgcgcatgcatgagcctagaaggccgaatatagatgtcgtacaaactacctttccagcattacgcccaataacgcgtgacaatacagcatcatccacgatggtcctcgaaatcgaacccagaaactggtaccgtgaggggtacttggtctctacggaacagaagctcattgatgtcgacgtggtgcatgaggtgatggcctccgacatcatgtcgtggacaaaagcagcgccaagggaagccgtagagaagatgcttcgtaattcattatgctttgggctctatgaattgccgaaatcaacttcagagatcgcaggccagagcagcccgagacaagtcggcctcgcgagagttatcacggatgatgtgacgtttgcgtatcttacggacgtttacgtgttgcctgagttgcaaggcaacgggctcggacgctggttgatagaatgtctggacgaggtactcaagtcctggccccatctggcaagtgtagaaagatcccaaacgagttattttcccaagacatcgtactaacttcattgtagtaggtgctctaacctgtcaaatatcagaaactggtcctttgtcttaaagcctgcggctacacaggggaatggtgaaaaataactaacgcaacgccactgcggctaccagacgccgctttttgcttgtgacgtctaccgcaaatagtctgtataagaagatacttggggcagaggagtgggaggaaagcaagggaagcgtgtcaatgcagacagtctggggaccagcggctgagcggcactgatcagactgtaaatttcgtaatgcaaacttcgcgagatgattttcacgctttgggaccagtcttcccgtatgcgcctccgtgtgctcgtcgcatctcgagtgcccgcttgtatggtggtgcggtaggtggttgaactgggtcgagcgaaacgtgatctggtggtagtcggtatgaggcgtctgagtcaaaagctgataaatcaccacaagcaatgaatggcgctatccatcgagctccgttgccttttcgcggacggcagtctaccggctctacttctgtaacaccgtgctcatctgtagtctggggcgtgcagggaccggagttccaagcacctgtctcctgattttggagtatagttgtcgcactgataggtgcgctcattgtattctcctccgtcatcttatcaagtcgatatccaatgccaagaggctcttcaagactcgctgaaaaccccttgggaggttgaaaattcaaacacacgatgaaggcttcgacgctgctggcgcgcgatgatctcggctttgcgacatggactcgctcgaagaatattttcagctgcgcatagagaatgtcgacgttcttgcccctgaagatcttggcgacaaaggtgccgcccggcttgagaacgcagagagccagattgagagcggcgaagagaagctgggattgcacgtagatgtccaaatcgtgcaatccagtaacatcgggagcgccatcgctaatgaccagatccacggggtgagcagcctgttgggagttcgttttgggatcgtagtcagggtccaaggcttttagcagcaggggcaccgttgcgggatgcgtgatgtcagctctcagtgttatgatgcccggaagaggagaaatcggctgtaggtcgatagatacaatcttgacatcgtctcgaggcttcagatctcgcagctctctgacttcagttactgtagtcgtcgtaggtgatttcgtggagccgaacacgcctagcatttgctggcgaaacttggcctctctatcctcccatgcggcacgcccaaatttctcacccttgatcaagaccctggaaaggacctgcgaccagcttcctggagctgcacacaagtcgaccacgcgagtgatattggcaaataagtcgaattctattagaggttagtggcagctca

SEQ ID NO: 40120 - DNA, 813 bp, Muscodor strobelii
  misc_feature: SGI cDNA ID NO. 573976
  misc_feature: Encodes the peptide sequence at SEQ ID NO 40121
atggaggtcattaaatcaaccttctcgagattctcgactaagtcatcaactgagtatcagagcgtcgacaacgaaagccaggagtacacaaaaaatgacgagagacaggggttccttacacacaaagaggatgcccaccccaaaaagcatggcggtacatcaccaaacccaactcgacgttctctatcgatatgcagtgtagtagcgatcgtaatcgctgccgtaatcttaacggcaacttctactcttctcttaggccggtctgcacgcaaatcggtaaacccgtggaactaccaagatgtctcagagcacgcaacagaagtcatcgcagatcttatcaaatcatcagagccgccgaagttccgcaactattctccctgtgggaatacagcggaagaagcaaaggcgaaagggtgccattttgatacgatatcgttttgttggttgcccgatgagtgctacgatcctgacctcgtcgaaaccttcgaggcaacgagaaattggcagtattatctagatgaagagggcaaacaccccatcagccacgaagagctcgtaggcggccacggcaataacctctgggttagctgggagtatcacctccgacactgcatgttcatgtggatgaagcttcatcgcgccgtgctagcaaagaatgacccaagcaagccgcagattgatggctatatcgccaacctgaatcatactaaccactgcgctacgatcctattgacggatcgtgatgtcgcctttcctacgctgaacacggagactctcgttaaatatccacattgcgggatgatatggacgtag

SEQ ID NO: 40121 - protein, 270 aa, Muscodor strobelii
  misc_feature: SGI Peptide ID NO. 573976
MEVIKSTFSRFSTKSSTEYQSVDNESQEYTKNDERQGFLTHKEDAHPKKHGGTSPNPTRRSLSICSVVAIVIAAVILTATSTLLLGRSARKSVNPWNYQDVSEHATEVIADLIKSSEPPKFRNYSPCGNTAEEAKAKGCHFDTISFCWLPDECYDPDLVETFEATRNWQYYLDEEGKHPISHEELVGGHGNNLWVSWEYHLRHCMFMWMKLHRAVLAKNDPSKPQIDGYIANLNHTNHCATILLTDRDVAFPTLNTETLVKYPHCGMIWT

SEQ ID NO: 40122 - DNA, 1668 bp, Muscodor strobelii
  misc_feature: SGI EST ID NO. CUFF.96954.0
  misc_feature: Variant of the nucleotide sequence at SEQ ID NO 40120
cagatctcttagtaagtcatcagtacctctattcatttgaagaattattcaggaattgaataaggagtgcatcctgctgacagttctcaaccttgcttgatataatcctggtcgacgtgcatttccgatcgaatgcaagccccggaccgaagaccagttccgaaaccagtcaattccgaagcagtgcccgttccggcacatacgccagcatggtccaaacattacaatccgggacggtacgatacgtatgaatcatacctgtagtactagttgcttgtatcatgggtacgtgagcgtcttgtcagcggcgccctgtggccgctaggggcgttaggatccctagatggcctggtacttcgcatctagagcgtgctaggcgacgtaggcattgccgactaatcgcaaaagatactcctcgcgtcctctctcgtagtcaatgattccagagagctgctcatgcaggccttacatgctttcatccaaacactgtttctgaacgcaactatcttgcttacgccatccaactactgttatttgctcggagcataccgcacgatggaggtcattaaatcaaccttctcgagattctcgactaagtcatcaactgagtatcagagcgtcgacaacgaaagccaggagtacacaaaaaatgacgagagacaggggttccttacacacaaagaggatgcccaccccaaaaagcatggcggtacatcaccaaacccaactcgacgttctctatcgatatgcagtgtagtagcgatcgtaatcgctgccgtaatcttaacggcaacttctactcttctcttaggccggtctgcacgcaaatcggtaaacccgtggaactaccaagatgtctcagagcacgcaacagaagtcatcgcagatcttatcaaatcatcagagccgccgaagttccgcaactattctccctgtgggaatacagcggaagaagcaaaggcgaaagggtgccattttgatacgatatcgttttgttggttgcccgatgagtgctacgatcctgacctcgtcgaaaccttcgaggcaacgagaaattggcagtattatctagatgaagagggcaaacaccccatcagccacgaagagctcgtaggcggccacggcaataacctctgggttagctgggagtatcacctccgacactgcatgttcatgtggatgaagcttcatcgcgccgtgctagcaaagaatgacccaagcaagccgcagattgatggctatatcgccaacctgaatcatactaaccactgcgctacgatcctattgacggatcgtgatgtcgcctttcctacgctgaacacggagactctcgttaaatatccacattgcgggatgatatggacgtagatagcgagagacgtgccggactttaggcatatgcggcgcattcgtcgttcgagattgtgtattgtatagttttacctctatttgcggcaatatagccagtcgtggcgtcagtcttcttgaggcatagtgccatagcgaatgtaaccattttaggatatttccaacttggcagtgaggcactcttgagttattcgaaattctacttcttttggaagcaatcttgaagagcatgcacgaatgtgagacgatgcgagaattgcataatatcagaagtgagcagatgcgacacgctcatggccg

SEQ ID NO: 40123 - DNA, 915 bp, Muscodor strobelii
  misc_feature: SGI cDNA ID NO. 573977
  misc_feature: Encodes the peptide sequence at SEQ ID NO 40124
atgtctcaattgtcgaagcccgatgaaggggacaatgaagatggtaacggtcacgaagaggcttttagtcgactactaatggaggacccggacttggaatcaaattctccgcccaagtccagttatgaaatgttggcattgtcaattagcctagcaggtctacaggctgcgtattgctctcaatttgcagatggcacagacttcttgttgagcattggcattagtcctgccgtgatcgcatctgtttggatcattccaccagtttgcggggcaacgttgcaacctcttttcggcatactgagcgataggttgatgtcaaagttcggtagacgagagccattcattttgctaggcggcgtcgggttgatcatcgccctgctcacgcaagcatggaacttaacgatcgcgactaccttagacggctcttgcactagatctggacccgtatgtctagctaaagtgatcgttagcttttttgctatcattctactatacgcatctgcgcaggctgttcaggtcgggacacgagcaaagatgatcgaatcctgcaatatcagtcaacagctaactatcaatacatgggcgagtcggatcatcagtctgacgagcgtgttctactatatgctctcttacagccttccgccgttgcggacacccgagctgcgcatgcaagagctagctctgatatctgtcattattattattgtgacaattagtatcgcttctgttatcggtttccaacaaccggccgttcatcctacggctaaggccttcccaatgaagaactcataccgacacaagtcctaccttcagcagttcaaagagattgtcactgttcgtatggcaaagatactggcggcgcaaagtattgcctcatttgcgtggtttccgtacttgttctatattagcaggtaa

SEQ ID NO: 40124 - protein, 304 aa, Muscodor strobelii
  misc_feature: SGI Peptide ID NO. 573977
MSQLSKPDEGDNEDGNGHEEAFSRLLMEDPDLESNSPPKSSYEMLALSISLAGLQAAYCSQFADGTDFLLSIGISPAVIASVWIIPPVCGATLQPLFGILSDRLMSKFGRREPFILLGGVGLIIALLTQAWNLTIATTLDGSCTRSGPVCLAKVIVSFFAIILLYASAQAVQVGTRAKMIESCNISQQLTINTWASRIISLTSVFYYMLSYSLPPLRTPELRMQELALISVIIIIVTISIASVIGFQQPAVHPTAKAFPMKNSYRHKSYLQQFKEIVTVRMAKILAAQSIASFAWFPYLFYISR

SEQ ID NO: 40125 - DNA, 1918 bp, Muscodor strobelii
  misc_feature: SGI EST ID NO. CUFF.96963.0
  misc_feature: Variant of the nucleotide sequence at SEQ ID NO 40123
aatttagcccaaaagttatcaagggagatgcttgacttattacaagagaaactgctgtcgttggttatcgaggaacaagtctatgttctaacttcatgatcatgtctcaattgtcgaagcccgatgaaggggacaatgaagatggtaacggtcacgaagaggcttttagtcgactactaatggaggacccggacttggaatcaaattctccgcccaagtccagttatgaaatgttggcattgtcaattagcctagcaggtctacaggctgcgtattgctctcaatttgcagatggcacagacttcttgttgagcattggcattagtcctgccgtgatcgcatctgtttggatcattccaccagtttgcggggcaacgttgcaacctcttttcggcatactgagcgataggttgatgtcaaagttcggtagacgagagccattcattttgctaggcggcgtcgggttgatcatcgccctgctcacgcaagcatggaacttaacgatcgcgactaccttagacggctcttgcactagatctggacccgtatgtctagctaaagtgatcgttagcttttttgctatcattctactatacgcatctgcgcaggctgttcaggtcgggacacgagcaaagatgatcgaatcctgcaatatcagtcaacagctaactatcaatacatgggcgagtcggatcatcagtctgacgagcgtgttctactatatgctctcttacagccttccgccgttgcggacacccgagctgcgcatgcaagagctagctctgatatctgtcattattattattgtgacaattagtatcgcttctgttatcggtttccaacaaccggccgttcatcctacggctaaggccttcccaatgaagaactcataccgacacaagtcctaccttcagcagttcaaagagattgtcactgttcgtatggcaaagatactggcggcgcaaagtattgcctcatttgcgtggtttccgtacttgttctatattagcaggtatatcaccgaaaagatcggcactcccactacgcggttaggcccactggcgcttttcctacaggcgtcagtatatgtgataacaagcttggcactgccatccttcgttcgccacacaggaaaacgaagtagaaacaacgactcaataagcatgccaaaattcgatgcaatacaaatatggagagcttctcaagctctttactcaatttgtgttgctggcatagtcttgacaagttccacttggctcatccttgccttggccggaacaactggggtttgctggggagttacaatggtaataccgtacactatgttaacagaggagtttctgacggaacatggcgatgatcgtagaagatcaagtcactctggaatgttcctgggaatcaataatctgtcgataactatcccccagatcattgcaggaattctatgcactaccatcttttcaacggtgtttgaagggcataccaattcgttgtctgatggaataatgacgagcctgacggccgggtcggtagtatctttactggcgacaggtctgttgatattcatgtagctcatgaagtataggcaaagttaattgatctggacttcacagtagcaaatttgtaactctgttactctatacgcatcattttagggtaaggtttatcatgcccattgtcagcaatgatgaactgaaggtaaaatattacgtcattcttcgtcgctgtcatcagtctcgagtctgatctcatgcccattgccttcgaatacccataaactcaagatacaggcgaatacagttacaccactcatgatccaccatggcagaccagtgtatccgtgtgcagatccatatgagtagaacagtccggctgcgatggggcttaccgtacgagtgaaactgtttgccatctccgc

SEQ ID NO: 40126 - DNA, 1572 bp, Muscodor strobelii
  misc_feature: SGI cDNA ID NO. 573978
  misc_feature: Elevated expression when VOC is produced
  misc_feature: Encodes the peptide sequence at SEQ ID NO 40127
atggcggaacctcaggcggacgttgcatggtctgatctaccaaataaaagtcaattggcaatcatctgtcttgctcgtttctctcagcctgtcgtacggacgtcgatctcgacatacgtattctaccagctccaaacattgaatccctctaaatctcccgagactatcgtccgcgatgccgccttgctccaaacggtttacacgcttacacaaggctgcacagcagtcctttggggccacctggctgactctcccagaggggggaggaagatggtgctgctcttcggccttggcggatcgttcgtgactactctggcgtttggctttattaccgatttccgtcaggccatagcaatccgcctgattgaaggggcagtcaatggcaatactgccatgatcaggaccatggtatctgaggttatcaaggaacgcagataccaagccaaagccttcatattgatgccgatgtgctacaatgtcgcagccataacagctccagttgtagcgggtctcttagccaacgtctccagtaaaagcgagctccccttcttccaaaagtttccttactcgcttcccgcgatcggaagttcttccgtcgcattcctagccttccttcttgtgttttttctgttgaaggagacacacgaagaagcgcggcacagatacgacccaggtctccatatctcggctagaatctcagctatattttcgcgatcttcaaaacatcagccgtactccgtagttgcgcaacaggaggcggatgaagaaagcgtccagtttgtagtagacgatgagattgaaatgagcccgttggatgagcaaagggaagttaagaaacaaatccttcctctacggcgcatattcacacggaatctttgcctcactctactagcatacgccataatggaagggcatgttgccgtctacaatacgttgtggcctagttttcttagtgatccggtcgcaactccggaggaagcccatgtccgacttccttttggcttcgtcggcgggctaggtatgccagttgataaagtcgccatatcgcttgcacttgctgggatccttggagttccattacagttcttcggttactcccgggtgatcaaacgattaggcatgctgaaaacctggcgcgtctttttgagagggtttcccttagtctatttcatcatcccttacctcgctgtcgtaccatcaagttcctctagaccttctcctcgagatggaccatttgtctgggctgcaatattcttcgcccaagcgctgatgatgttcagcgcgtcattcgctgtgccatctcagaccgtattgactaacaatgcatcaccacacccatcggcgctgggaaggacacatagtatagcggagatggcaaacagtttcactcgtacggtaagccccatcgcagccggactgttctactcatatggatctgcacacggatacactggtctgccatggtggatcatgagtggtgtaactgtattcgcctgtatcttgagtttatgggtattcgaaggcaatgggcatgagatcagactcgagactgatgacagcgacgaagaatga

SEQ ID NO: 40127 - protein, 523 aa, Muscodor strobelii
  misc_feature: SGI Peptide ID NO. 573978
  misc_feature (22)..(468): Pfam Id: PF07690 Pfam Desc: Major Facilitator Superfamily
  misc_feature (60)..(219): Pfam Id: PF07690 Pfam Desc: Major Facilitator Superfamily
  misc_feature: Useful for introducing or modulating the production of volatile compounds
MAEPQADVAWSDLPNKSQLAIICLARFSQPVVRTSISTYVFYQLQTLNPSKSPETIVRDAALLQTVYTLTQGCTAVLWGHLADSPRGGRKMVLLFGLGGSFVTTLAFGFITDFRQAIAIRLIEGAVNGNTAMIRTMVSEVIKERRYQAKAFILMPMCYNVAAITAPVVAGLLANVSSKSELPFFQKFPYSLPAIGSSSVAFLAFLLVFFLLKETHEEARHRYDPGLHISARISAIFSRSSKHQPYSVVAQQEADEESVQFVVDDEIEMSPLDEQREVKKQILPLRRIFTRNLCLTLLAYAIMEGHVAVYNTLWPSFLSDPVATPEEAHVRLPFGFVGGLGMPVDKVAISLALAGILGVPLQFFGYSRVIKRLGMLKTWRVFLRGFPLVYFIIPYLAVVPSSSSRPSPRDGPFVWAAIFFAQALMMFSASFAVPSQTVLTNNASPHPSALGRTHSIAEMANSFTRTVSPIAAGLFYSYGSAHGYTGLPWWIMSGVTVFACILSLWVFEGNGHEIRLETDDSDEE

SEQ ID NO: 40128 - DNA, 2665 bp, Muscodor strobelii
  misc_feature: SGI EST ID NO. CUFF.96964.2
  misc_feature: Variant of the nucleotide sequence at SEQ ID NO 40126
ctcgcatgcaagcgaaatgcttctaggcagtatcgatgagcatagtagaattcggactcggaatgagaactagtagtgttgctttgggcgcgttatgcaagttatgccagctgatatcatgtaccttaatacgctgcttgcacgcgggcgttactaatcctctctgtgctctgagattttggataacttgattgatcgataggacgatgggtgagattaccatgccgcccatctttgtgtaccttgatttcctctgccttagctcacctcgacaatgctctttctcatgccattgcttgactccaactatccccgcccaacgtcatccacctgtggtcggggaagcttataatcttttgccgcttgatctgttgccatcgctacagaagacatggcggaacctcaggcggacgttgcatggtctgatctaccaaataaaagtcaattggcaatcatctgtcttgctcgtttctctcagcctgtcgtacggacgtcgatctcgacatacgtattctaccagctccaaacattgaatccctctaaatctcccgagactatcgtccgcgatgccgccttgctccaaacggtttacacgcttacacaaggctgcacagcagtcctttggggccacctggctgactctcccagaggggggaggaagatggtgctgctcttcggccttggcggatcgttcgtgactactctggcgtttggctttattaccgatttccgtcaggccatagcaatccgcctgattgaaggggcagtcaatggcaatactgccatgatcaggaccatggtatctgaggttatcaaggaacgcagataccaagccaaagccttcatattgatgccgatgtgctacaatgtcgcagccataacagctccagttgtagcgggtctcttagccaacgtctccagtaaaagcgagctccccttcttccaaaagtttccttactcgcttcccgcgatcggaagttcttccgtcgcattcctagccttccttcttgtgttttttctgttgaaggagacacacgaagaagcgcggcacagatacgacccaggtctccatatctcggctagaatctcagctatattttcgcgatcttcaaaacatcagccgtactccgtagttgcgcaacaggaggcggatgaagaaagcgtccagtttgtagtagacgatgagattgaaatgagcccgttggatgagcaaagggaagttaagaaacaaatccttcctctacggcgcatattcacacggaatctttgcctcactctactagcatacgccataatggaagggcatgttgccgtctacaatacgttgtggcctagttttcttagtgatccggtcgcaactccggaggaagcccatgtccgacttccttttggcttcgtcggcgggctaggtatgccagttgataaagtcgccatatcgcttgcacttgctgggatccttggagttccattacagttcttcggttactcccgggtgatcaaacgattaggcatgctgaaaacctggcgcgtctttttgagagggtttcccttagtctatttcatcatcccttacctcgctgtcgtaccatcaagttcctctagaccttctcctcgagatggaccatttgtctgggctgcaatattcttcgcccaagcgctgatgatgttcagcgcgtcattcgctgtgccatctcagaccgtattgactaacaatgcatcaccacacccatcggcgctgggaaggacacatagtatagcggagatggcaaacagtttcactcgtacggtaagccccatcgcagccggactgttctactcatatggatctgcacacggatacactggtctgccatggtggatcatgagtggtgtaactgtattcgcctgtatcttgagtttatgggtattcgaaggcaatgggcatgagatcagactcgagactgatgacagcgacgaagaatgacgtaatattttaccttcagttcatcattgctgacaatgggcatgataaaccttaccctaaaatgatgcgtatagagtaacagagttacaaatttgctactgtgaagtccagatcaattaactttgcctatacttcatgagctacatgaatatcaacagacctgtcgccagtaaagatactaccgacccggccgtcaggctcgtcattattccatcagacaacgaattggtatgcccttcaaacaccgttgaaaagatggtagtgcatagaattcctgcaatgatctgggggatagttatcgacagattattgattcccaggaacattccagagtgacttgatcttctacgatcatcgccatgttccgtcagaaactcctctgttaacatagtgtacggtattaccattgtaactccccagcaaaccccagttgttccggccaaggcaaggatgagccaagtggaacttgtcaagactatgccagcaacacaaattgagtaaagagcttgagaagctctccatatttgtattgcatcgaattttggcatgcttattgagtcgttgtttctacttcgttttcctgtgtggcgaacgaaggatggcagtgccaagcttgttatcacatatactgacgcctgtaggaaaagcgccagtgggcctaaccgcgtagtgggagtgccgatcttttcggtgatatacctt

SEQ ID NO: 40129 - DNA, 699 bp, Muscodor strobelii
  misc_feature: SGI cDNA ID NO. 573979
  misc_feature: Encodes the peptide sequence at SEQ ID NO 40130
atgtcgtatgcgccgctcaagactcaaccgatgaatgttgagaatgccggaggaacggcagaggtagacaaagaagacgaatggtcgatgtcatctggcacgccagatatgcatcggcggagttctcgtactgtgacaactatcaaagctgtcgcgaccattctgctattcgcggccgccttcatgctgggacgaaaaacaacatctagtacctggcatcataagctgaatagagagaataaagagcttgtatcactcggcaaatgccctcccgactggaaagaagcagaggaggcgggctgcgtttacgatctcgtgctgtcgacatggttgcatccagaatgtttcaacaaagagatgcacgagaagtacaagatcgtcttgagagacatggacttcaggtactggctggagcccgaaatgattaacgagatttcgcttgaggcaatggaaacaggcgagcatggctgggtttggacagacgggcgattccatcacttgcactgcgcatacgctctagagcgcatccaaaacgccttgatgaaggaacctatcatccttgacactatctgccggggtcaggaccatctccatcattgtctacagtacaacggcaatccggaatgggcagacgtgaaagccctcaacacgaccagaatatttaacgaggactatctgatcgactgtttagtagggtga

SEQ ID NO: 40130 - protein, 232 aa, Muscodor strobelii
  misc_feature: SGI Peptide ID NO. 573979
MSYAPLKTQPMNVENAGGTAEVDKEDEWSMSSGTPDMHRRSSRTVTTIKAVATILLFAAAFMLGRKTTSSTWHHKLNRENKELVSLGKCPPDWKEAEEAGCVYDLVLSTWLHPECFNKEMHEKYKIVLRDMDFRYWLEPEMINEISLEAMETGEHGWVWTDGRFHHLHCAYALERIQNALMKEPIILDTICRGQDHLHHCLQYNGNPEWADVKALNTTRIFNEDYLIDCLVG

SEQ ID NO: 40131 - DNA, 461 bp, Muscodor strobelii
  misc_feature: SGI EST ID NO. CUFF.96950.0
  misc_feature: Variant of the nucleotide sequence at SEQ ID NO 40129
cgaaaaacaacatctagtacctggcatcataagctgaatagagagaataaagagcttgtatcactcggcaaatgccctcccgactggaaagaagcagaggaggcgggctgcgtttacgatctcgtgctgtcgacatggttgcatccagaatgtttcaacaaagagatgcacgagaagtacaagatcgtcttgagagacatggacttcaggtactggctggagcccgaaatgattaacgagatttcgcttgaggcaatggaaacaggcgagcatggctgggtttggacagacgggcgattccatcacttgcactgcgcatacgctctagagcgcatccaaaacgccttgatgaaggaacctatcatccttgacactatctgccggggtcaggaccatctccatcattgtctacagtacaacggcaatccggaatgggcagacgtgaaagccctcaacacgac

SEQ ID NO: 40132 - DNA, 9267 bp, Muscodor strobelii
  misc_feature: SGI cDNA ID NO. 573980
  misc_feature: Encodes the peptide sequence at SEQ ID NO 40133
atgagtacaagaggtcatgagcacttcgatctcatgccacctgactatgcttgggatctcatatttgaagagctcggaatttcaggcgcgacgtggagtgcccaagcccttgaactcattgaaaatgtgtacccatgcagtccaatgcaggagagcatttatgtggcaagagaaacaaagggaaagcagctctatgtaattcatgagctgtttgaaatggggccacgtatgacatttgacaacctacaaacggcatggaaattggttgtcgagcgccacgagagtttgcgtacgatagttgtgccgacaacagactctggaacttctaggttacttgatgccgtggttctcaaggaatggaattcggtgctagatcgtgtcaagtgcacaaactacgctgccgtcctcgcagcctatgagaagagctgcaaagatccagcacacttttcaaagggccctcttcatcgccttacaatatacgacactgatgaaggtcggctattctgtcaatttgagctaagccatatgattagcgacggagcatcagttatgaacatacttgatgatctaaatgaagcggtagacggttctgcgcttgatgttgcacccggatacagcagtgtcctcaagtatagcgcttccccgaagaaattcgatgagagcattggctattggaagtcgtttcttcatgatacacagccatgtaactttccgtccctctggacagggagtcgaatgaaagaatcagacgcttcacatgcatgccgtgttgtggagctaccgtttcaaagacatatagaacttagtgcgttctgcatcaaaatgcaaatcactatgtcgacactatctcaagccgtatgggccatccttctacgcacctatactggtaacgaggaagtttgtttcgcacagacctgctcgggacgcgatatacagctagacggcatcgagacgatatgtgggccgctcgttaatctcgttgttcgtcgagttcgttttgcaggaaagagtctcagaagcatgatagagactatccaagaagactttgtcaactctctgcagcaccaaacagtgccttttatgcgcgtacaacagcttttcaaaatggcagagagaatgttcaacacgatcttgacggtgcagtatgcaccatcacttgtggacgagcgcgatgatcttccattaaggcgaattaccgcgttcaatgcgacggactttggcctgtctatgcatgtcacatactcagcgaccgccacgaagacacaacttacatactccgaaagtctgctttcttcggtcatggcggagcgagtgatgaagacctttctttcaatcatagacagcctcttagatacgactgacatcgatgctcaagtaggtcagcttccagtaagtagcacttcagactttcggcaggtcatggattggaatcgtgaaacactcgaagaagtcggcgggcagcttccagacgcaacagtacacggattgattgaagaggcagctttgcgcgcacctagttcaccagcaatctacttttcaggcgagatattcaattacagcgacttggatactatgtcctcttgtcttgcacaacagatactcaagttactgagctacgatcaacagttcatacccttattctttgaaaaatccgcaatgtactctattgcactattggcggtcctaaaatgcggcagggcgtttgtacctatagacatctcgaatccgcttgatcgaacacagcgactctttgaacaactagggatcaattcttcatccggtattgttatctgttccgaaaatcggtcagatcagctacaatcgatttgccgtcagcttttgacacctagcatagacggtctgcgggcagaccttaggaagtctaacactacagctttatctactctgctaccagtagtaaattcaaaatctccagcgtatatcatcttcacatctgggagtacaggtgaacccaagggtgtcgtggtcagtcaccgtgcttacgcacatgcagcgcgaactcatgcttctggaatacatatcggtcctgggtcccgggtactacaatttgcatcatatgcattcgatacgagcatggaagatcatttgacaaccttcattgttggtgcatgtctctgtgttccagcagaatatgaacgcgacacggccctagttgattttatcaacttgtccggcgctaactggcttcatatcactccttcgatgatggtcatgatatcgcctctttctgtcccttcactgaagaccatcgctcttggaggtgagtcaatgacaaatgataacgtctcgaagtgggcgattccgggaagacgcttgatccaggtttacggaccttccgaatgctcagttacaagcacaatcaatcccgatgtttccgaccgacgggatcctaccaacataggaagggcgtttgctggttgtgcaacttggattacagacctgaataatcctgaaattctgtgtccaattggagctgttggcgagctgctcgtcgagggtcctatcttagccaacgggtattttggggacgaatctgccacagacaccgcgtttatcaccaatgtcagctggtcccccggcaaaagactatatcgcaccggagatctggtccagtatgatgagagaggagagctccatttcgttggaagagccgatagtagaatcaaactcagaggacaacgcatagaatgtggcgagatcgagagccaacttgtcacacacaactcagttgtccatactgtagttgtcgttccaaagtctggccctggtgcggaacgattagtggctgtcatatcactcacatctaccagcgatgtggccgatctcgaacagctaggttacaacatgcgatcggaagatctagatgctgttaaaacagttgaagtcacaaacagtctcaacacctggctgacagatcggttaccagcttacatgataccggatctgtttatttttgttcgtcacatacccatgaacttgtccaagaaactcgacaggaatcgtgttttcaactacattgaaagaggtgactcaatctccgcgatgatgctgagtagcgagttgagaaaggaatcgattagaatctctgcaagggacatcctccgactacgtagcatcgaacagattgcgactcgtattcaagagacgctcccaagcgaagaggatgcgaggtatatgaatatcgatcatacggtgacagatacagacggaccttggaatctgtcgccaattcaacagctcagtttccaattctttccagatggcgatgattttgaccagcagatcatggtcgtcgacacaaatttggacctatccaatgaagtcattgtcagggcgctagacaccgtaacgcaggctcaccccatgctactcgctcgctttgcaccctactcctcttctggaacgcagatctggctgcaacatataccaacaggttccttcaccaaagcagcttattcaattcgattccatcaagaaacagacgtcgatttcaagctgagatccatatctgagaccaagtcgagaatcaatttgatgaatgggcccattatgggagtagacattttccgatctactgagtcaacaaccatttcgatctgtattcatcatctagttgtggatatggtctcgtggagaatcattttccaagagctggaagatttggtcacagagcagagttgcgtccagccagaacccatatctttccaatcatggtgtagagttcaacaggtgtacgccgaaaaactcaatccctcaaaaattctccctgatgatgaggatgaagtcaatacaagtttttggggcatggaaaaaattccaaacgtgttcgaggatgccgtgtcgacgatattcaacctggattcctctgagacttcagctctcctgggtatctgtgaccaacttggatataccgtggtagatgtgatatgtgcagccatcacaagctctttcgctcaaacgtttaggtcacgcaccccacctgctgtttttgtcgaaggccatgggagagagcctatagccgagggcatcgatctttctcggacggtaggatggttcacaaccttcactccagtacaagtgttgcatgacaaagagctcaacagaatggagacccttgagcaggttaagcaattccgtgacgctacgccatcaaaaggactcgattattttacataccgcttcctacgacgagagcggcccaacgaatatcagcaacgccatggccttgccgaggtcctcgttaactacttaggtgtatatcagcaatttgaacgtgccgactctgcgttcaaacgctgtgatgacccaaagattctattgggtctttcgacaatgcggcgtgaacagcgacaaagatcaaagcgatatagcttgatatcattggttgctggtgtgcgcaatggttcattggtaatcgaagtggaatggaataaacgaatgcactttcaatccgaactgaacttgttgccagacagagtgaaggatgagatgctattgctgttacatgatctcacccacggtcccgctacttcgacccctcttcttgcgccaatgtccgacattacacacttcggcgtcgatagccagaagactttagacaaggcgatgagtctaggagtgttcgaacatgaaattgaaagcatatatccatgttcgcccatgcaagagggaataatggcaagcctactcagggattcagacacgtcatcggcatatgaccaaacattcctattgaagatcacctcatccgatgacaaacagattttaagtgaaaacgttgtgaatatatggctacagattgtacaaaaatacgcagtcttgagaactatctttgtggaaagcaataccggcgaatttgttcaagttgtcctgcatcgcatcaacccaaagctagtaattcaagacggtgtcgcagaggaagaactgatgtctagtctatttgggtcggagaaccaatcattacactcacctctcagcggatttcctttgcatcgtatcatggtttctaaaacctccgaaggaccgacatttgttttgctcactaaaagccatcttctcactgacggcttgagcactcaaatcctgatgcgagatttagcacgtggatgtgagggtcagttggagaaatatcttgagccacacaactacttcttcgactatattcgctatattttgaatcaagacgtcaatctcacaaagacttattggagaacttatctcgagagtgcagtagcttgccattttcctaggctctgctacagtattgaaataccagatgagaagatcaagcactcaagtgtttcattgcaactacaagcatctcaagctgagcttcgccagctgtgcagagcccatgatcttacaatacccagtgtctttctcctagcatggggacttgtcttaagaacatatgtaaattcggacgatatactctttgggttactctcatctgggagagatttgccagtagaaggtctggaaaaagctgttggcccggtcgctaatatacttccaattaaaagcaacatatcctcacgaaacagaattgtcgaagttgccaagaacatgcaggccgattatatcgaacatctttctcggcaacattttccgcttgcccaaatactacatgcagcacgagatggaggccatattcccagctttaacactattctcaatatccaaaaggcggaggcgactcaaaatgagtcatgccccaatgccgtgcgagtgaatttcgtaaagtcaaaagatactacagagtatggtcttgccatgacggtcatggacaagcaaggcgtctatactttgtctctggagtacgaaacaaacttgatatcttcttttgaggcccatgggattgtttcggctttcgaagcagccgtcaagagtgtcgtagctaatcctgattgtcttgttgaagacgtaaactttatcagcgatgaggaccgagaacagatacaacaatgggatacaaataaactccaaaccaaggacgaatgtgttcaccagctctttcaagctacggctctcagtatatctggaaatgaagccctctgctcctgggatggtaccttgacctatggagaactagaaactgtgacaaacacactttcgcgaagactcttacgactctcatctgttcgtaaccaaaacataatggagtcactggtcccacagacactcacgatcggccacgagatattcgtagagaagggggattcgactaattccgtgcccttcaacctggatgatcgcgtgaaatcatcgaatgcgctctacgttattttcacttctggatccacaggagaaccgaagggggtggtcattgagcacaggaatttttgctccgctatggcggcaaatgcaaattggcttcagatccttccatcgtctcgccttcttcagttcagtagctttgtcttcgatgcatgcatggaagaaatactcactgcattagtcacaggggcttgtgtctgtgtaccgtcagacgaagaccgaatgaatcccgacagactcacatctttcattcaggatgctcgcgtaaattgggctgcattgacgccatcttttctccagactctcaacccagactccgtcgtacctcctttgaacttcatcactgtccatgcagaagcaatgaatgcatcattaggcaaactttggagtgggcgcgtgcatatgcgtccgagttatggtccaaccgaatgtaccgtcacaagtacagtcggggaagcctttaccggggaatctgaccctacaaatattggttggccagttggctgtcacggccgaatcactgatccgcacaatcctcaacgattagtccccatcggtgccgtgggtgagcttatactcgaagggccgattctcgcacgcggttacttgaacagaccgacagaaacagatgcagcgtttccaatcattcaaagctggttcgacgggagcccgaggagagtttaccgaaccggagacttagtacgctatgctggagatggatctctgcgtatcctaggtcgtcgagatacccagatcaaagttcgcgggcagcgagtcgaacttggagaaatacaaagtcaacttgatatgtctcctgatattcaccactcgctagtaatgcaaccgaaaatcgggcttctatcgggtcgcttagttgccgtgctcagtctcacaaaatcacttcaggcgccacaattagggggtctgcagaatcgcacaatccgactcatgaatgatccggcagcgtcttgcagtattgagaatccagagatgtcggcagtattgcatcaaattcgaaaatttgtttcagctagactaccatcatatatgattcctcacacttggtgtgttgtagaaagcatgcccaccttggcttctttcaagttggacaggaagctcgtaaacaactggttggagacgatggatgaaaagacgcttctacttgctcgtcgactcacgagtagcgcaaaaacatctgactctgaggctactgacacagaagatgaaaagttgataagggctgcctggtctaaggttcttgagatgcctgcagaatctattgacctcgacgatcatttcattgcacttggcggtgactcaatatccgctatgcacgtttcccgctttttaaacaatgcgggggtatccattaagacgcatcacgtcctcaagagcaacagcatacgggaacttgcattggcgctaagagctgagacgccacgggagctttcaacaggaacgcaactgagagatcggccgatcggattgggagctatcccaacagctgcagagcttctatccgagcatgggttcaacgtggccgacgaatcccggattttgtctgtacatcgcagcacaccttttcaattgagaacaactacagctttttacacatttccttggcggccatacctttacaacttgtttgcagaaatcagagggtatgaccaggaaatagacgctcatcgactcctaagtgcttggcgcgcgaccgtagcacggcatgagattctccgtactgcaattccacttacaaaagatggtagtgcaacatatcaagttgtgttagacgagtctactgcaacttgtgtcgcgctcgatgtcgagacggagaaagaggctcacaatgcgagcattaagaagacgcaagaaattaaagcaagcctctccccaacatccctaacgccaccactatggctctatatatacaccacttcgagaaagcaagtatacgtgcatatgctgatcggacacatgctgaccgatcacgtatcgctcgcacatgtgctttatgactgggatgcgctttatcgtgacgattcatcacagcttacagaggtatcccatctccctcaattttcgaagtacgttgacgacatagagacccgagatttcctggaaagtgacaactattggtgtcaaaagctgagcggagcgaaatcaacaatcttgaagccatcacatgacttgaccgacaaccacgcagcgcttgccagttcggcggatgcgtttatgtctgcaatcaagttccaaatagcgatcgacgcaaaaatgaatcagtactgtcgcgccgcgcgagtgacggtatcgactctgctgcaatttgcgtgggcagtgctactaagtgtttacacacaggaggcatccgtctgcttcggacatcttgcatctgaccgcgatatcgacgttgaagatgcggacaacattgtagggccaatgttggcacttttagtgacacgtgtagccttaggaggcagcgattcctcctctgaagtaccgactatacaagaagtcattcgagagctccaaaatgatagcactgatgggattgcacataaggtcttcgattattcagcggtcgaaagaagactcgggatcggcatacacgaaactcctctcttcaatactctttttaactaccgtaaagtaagacgcgctgggccagagccaatgatgaaactccgatcgctacttaaacaggatccgcacgagcaacaagtaatactcagcttcaacgaagtccaacatccagctcaccttgagggaacaatcactttctacgactcagtgcattcggtacgtgatgtccggcaaatgacaggactgtacacagaaatcttgtcccttgtgatcaacagggagtgcgaatcaaccgagcagcttgtccgtcgaataaaggatattcacgagtcagttgacaccgaacgggacaccaaacatgatgtgggtatggaatctacaagggcatag

SEQ ID NO: 40133 - protein, 3088 aa, Muscodor strobelii
  misc_feature: SGI Peptide ID NO. 573980
  misc_feature (518)..(922): Pfam Id: PF00501 Pfam Desc: AMP-binding enzyme
  misc_feature (2033)..(2378): Pfam Id: PF00501 Pfam Desc: AMP-binding enzyme
  misc_feature (1552)..(1851): Pfam Id: PF00668 Pfam Desc: Condensation domain
  misc_feature (40)..(334): Pfam Id: PF00668 Pfam Desc: Condensation domain
  misc_feature (1075)..(1370): Pfam Id: PF00668 Pfam Desc: Condensation domain
  misc_feature (2618)..(2923): Pfam Id: PF00668 Pfam Desc: Condensation domain
  misc_feature (2509)..(2574): Pfam Id: PF00550 Pfam Desc: Phosphopantetheine attachment site
  misc_feature (2093)..(2378): Pfam Id: PF00501 Pfam Desc: AMP-binding enzyme
  misc_feature (2861)..(2923): Pfam Id: PF00668 Pfam Desc: Condensation domain
  misc_feature (1291)..(1370): Pfam Id: PF00668 Pfam Desc: Condensation domain
  misc_feature (2654)..(2819): Pfam Id: PF00668 Pfam Desc: Condensation domain
  misc_feature (1176)..(1228): Pfam Id: PF00668 Pfam Desc: Condensation domain
  misc_feature (1016)..(1053): Pfam Id: PF00550 Pfam Desc: Phosphopantetheine attachment site
  misc_feature (44)..(2037): SWISSPROT Homolog: EC 5.1.1.3 Glutamate racemase
MSTRGHEHFDLMPPDYAWDLIFEELGISGATWSAQALELIENVYPCSPMQESIYVARETKGKQLYVIHELFEMGPRMTFDNLQTAWKLVVERHESLRTIVVPTTDSGTSRLLDAVVLKEWNSVLDRVKCTNYAAVLAAYEKSCKDPAHFSKGPLHRLTIYDTDEGRLFCQFELSHMISDGASVMNILDDLNEAVDGSALDVAPGYSSVLKYSASPKKFDESIGYWKSFLHDTQPCNFPSLWTGSRMKESDASHACRVVELPFQRHIELSAFCIKMQITMSTLSQAVWAILLRTYTGNEEVCFAQTCSGRDIQLDGIETICGPLVNLVVRRVRFAGKSLRSMIETIQEDFVNSLQHQTVPFMRVQQLFKMAERMFNTILTVQYAPSLVDERDDLPLRRITAFNATDFGLSMHVTYSATATKTQLTYSESLLSSVMAERVMKTFLSIIDSLLDTTDIDAQVGQLPVSSTSDFRQVMDWNRETLEEVGGQLPDATVHGLIEEAALRAPSSPAIYFSGEIFNYSDLDTMSSCLAQQILKLLSYDQQFIPLFFEKSAMYSIALLAVLKCGRAFVPIDISNPLDRTQRLFEQLGINSSSGIVICSENRSDQLQSICRQLLTPSIDGLRADLRKSNTTALSTLLPVVNSKSPAYIIFTSGSTGEPKGVVVSHRAYAHAARTHASGIHIGPGSRVLQFASYAFDTSMEDHLTTFIVGACLCVPAEYERDTALVDFINLSGANWLHITPSMMVMISPLSVPSLKTIALGGESMTNDNVSKWAIPGRRLIQVYGPSECSVTSTINPDVSDRRDPTNIGRAFAGCATWITDLNNPEILCPIGAVGELLVEGPILANGYFGDESATDTAFITNVSWSPGKRLYRTGDLVQYDERGELHFVGRADSRIKLRGQRIECGEIESQLVTHNSVVHTVVVVPKSGPGAERLVAVISLTSTSDVADLEQLGYNMRSEDLDAVKTVEVTNSLNTWLTDRLPAYMIPDLFIFVRHIPMNLSKKLDRNRVFNYIERGDSISAMMLSSELRKESIRISARDILRLRSIEQIATRIQETLPSEEDARYMNIDHTVTDTDGPWNLSPIQQLSFQFFPDGDDFDQQIMVVDTNLDLSNEVIVRALDTVTQAHPMLLARFAPYSSSGTQIWLQHIPTGSFTKAAYSIRFHQETDVDFKLRSISETKSRINLMNGPIMGVDIFRSTESTTISICIHHLVVDMVSWRIIFQELEDLVTEQSCVQPEPISFQSWCRVQQVYAEKLNPSKILPDDEDEVNTSFWGMEKIPNVFEDAVSTIFNLDSSETSALLGICDQLGYTVVDVICAAITSSFAQTFRSRTPPAVFVEGHGREPIAEGIDLSRTVGWFTTFTPVQVLHDKELNRMETLEQVKQFRDATPSKGLDYFTYRFLRRERPNEYQQRHGLAEVLVNYLGVYQQFERADSAFKRCDDPKILLGLSTMRREQRQRSKRYSLISLVAGVRNGSLVIEVEWNKRMHFQSELNLLPDRVKDEMLLLLHDLTHGPATSTPLLAPMSDITHFGVDSQKTLDKAMSLGVFEHEIESIYPCSPMQEGIMASLLRDSDTSSAYDQTFLLKITSSDDKQILSENVVNIWLQIVQKYAVLRTIFVESNTGEFVQVVLHRINPKLVIQDGVAEEELMSSLFGSENQSLHSPLSGFPLHRIMVSKTSEGPTFVLLTKSHLLTDGLSTQILMRDLARGCEGQLEKYLEPHNYFFDYIRYILNQDVNLTKTYWRTYLESAVACHFPRLCYSIEIPDEKIKHSSVSLQLQASQAELRQLCRAHDLTIPSVFLLAWGLVLRTYVNSDDILFGLLSSGRDLPVEGLEKAVGPVANILPIKSNISSRNRIVEVAKNMQADYIEHLSRQHFPLAQILHAARDGGHIPSFNTILNIQKAEATQNESCPNAVRVNFVKSKDTTEYGLAMTVMDKQGVYTLSLEYETNLISSFEAHGIVSAFEAAVKSVVANPDCLVEDVNFISDEDREQIQQWDTNKLQTKDECVHQLFQATALSISGNEALCSWDGTLTYGELETVTNTLSRRLLRLSSVRNQNIMESLVPQTLTIGHEIFVEKGDSTNSVPFNLDDRVKSSNALYVIFTSGSTGEPKGVVIEHRNFCSAMAANANWLQILPSSRLLQFSSFVFDACMEEILTALVTGACVCVPSDEDRMNPDRLTSFIQDARVNWAALTPSFLQTLNPDSVVPPLNFITVHAEAMNASLGKLWSGRVHMRPSYGPTECTVTSTVGEAFTGESDPTNIGWPVGCHGRITDPHNPQRLVPIGAVGELILEGPILARGYLNRPTETDAAFPIIQSWFDGSPRRVYRTGDLVRYAGDGSLRILGRRDTQIKVRGQRVELGEIQSQLDMSPDIHHSLVMQPKIGLLSGRLVAVLSLTKSLQAPQLGGLQNRTIRLMNDPAASCSIENPEMSAVLHQIRKFVSARLPSYMIPHTWCVVESMPTLASFKLDRKLVNNWLETMDEKTLLLARRLTSSAKTSDSEATDTEDEKLIRAAWSKVLEMPAESIDLDDHFIALGGDSISAMHVSRFLNNAGVSIKTHHVLKSNSIRELALALRAETPRELSTGTQLRDRPIGLGAIPTAAELLSEHGFNVADESRILSVHRSTPFQLRTTTAFYTFPWRPYLYNLFAEIRGYDQEIDAHRLLSAWRATVARHEILRTAIPLTKDGSATYQVVLDESTATCVALDVETEKEAHNASIKKTQEIKASLSPTSLTPPLWLYIYTTSRKQVYVHMLIGHMLTDHVSLAHVLYDWDALYRDDSSQLTEVSHLPQFSKYVDDIETRDFLESDNYWCQKLSGAKSTILKPSHDLTDNHAALASSADAFMSAIKFQIAIDAKMNQYCRAARVTVSTLLQFAWAVLLSVYTQEASVCFGHLASDRDIDVEDADNIVGPMLALLVTRVALGGSDSSSEVPTIQEVIRELQNDSTDGIAHKVFDYSAVERRLGIGIHETPLFNTLFNYRKVRRAGPEPMMKLRSLLKQDPHEQQVILSFNEVQHPAHLEGTITFYDSVHSVRDVRQMTGLYTEILSLVINRECESTEQLVRRIKDIHESVDTERDTKHDVGMESTRA

SEQ ID NO: 40134 - DNA, 1173 bp, Muscodor strobelii
  misc_feature: SGI cDNA ID NO. 573981
  misc_feature: Encodes the peptide sequence at SEQ ID NO 40135
atgacatcagtatcaaatacaacatgccagatcatatctgagaactgtgcacagcttgagagtttgaacgtatctgcgtgccaatatatggatgcgataggtgttcaaaccgtcgtacaaggttgtcacaaactcaaggcgttacgagctggagaaatccggggatttgatagtctagacgttgcgaaagccatcttccagacaaacatgctcgaatgtttggtgcttagtggttgcgatgacctaacggacgagtcattcaagactatgattcgaggtttcgttatacccgagaccgacaatcttacggacgggacaatcgtgccatctagaaaccttcggcatctcgacgtaagtcgatgcaagcgattaacaaccgacagcgtcaaagttctcggtcgtcttgttccgacgcttgaagggctccagcttagcggttgtccagccttgaccgacgccgctctacagcctattctcgcctccacgccgcatctcactactctagggctggactatctttcaaaactcaccaatgacctgctatcgacgcatctcgccaaatcaccctgtatagagacgttacagcacgtttctattagtaattgtgggaatattggtgatgatggggtcttgccactcatcgagaaatgtgccaacatcaagacaatgcttatggatggcacaaaggtgagcgaccttgttctcacgaaagcggccaacatggttcgaatacgagccgctgggaaatcgtctggcagctcgtatccctctatcggactcaagctcgttgtattcgactgcccatttgttacctgggcaggcattcgagatgtcttgatatggaacgcagagatatcgcggccgcctaacgacgagacaatgcctcctaaagaggttatcggtctcgtaggatcatacctatggcacaagacggtagagcagcacacgcagcacgtcctacggggcgacttcgccgcggcgcgaaaactgggaagaaagtgggcagatcacatgcagtctatagagcaagcgagggcaacgggtgctggccgacaccgcgaaaggcatgcggcaggcgagagccaaagggtccaggtgtacgaggaagtcagtatgactagaaccaggcacaggtatccgatgatacaggcagcaaattgtgttcttatgtga

SEQ ID NO: 40135 - protein, 390 aa, Muscodor strobelii
  misc_feature: SGI Peptide ID NO. 573981
MTSVSNTTCQIISENCAQLESLNVSACQYMDAIGVQTVVQGCHKLKALRAGEIRGFDSLDVAKAIFQTNMLECLVLSGCDDLTDESFKTMIRGFVIPETDNLTDGTIVPSRNLRHLDVSRCKRLTTDSVKVLGRLVPTLEGLQLSGCPALTDAALQPILASTPHLTTLGLDYLSKLTNDLLSTHLAKSPCIETLQHVSISNCGNIGDDGVLPLIEKCANIKTMLMDGTKVSDLVLTKAANMVRIRAAGKSSGSSYPSIGLKLVVFDCPFVTWAGIRDVLIWNAEISRPPNDETMPPKEVIGLVGSYLWHKTVEQHTQHVLRGDFAAARKLGRKWADHMQSIEQARATGAGRHRERHAAGESQRVQVYEEVSMTRTRHRYPMIQAANCVLM

SEQ ID NO: 40136 - DNA, 230 bp, Muscodor strobelii
  misc_feature: SGI EST ID NO. CUFF.96996.0
  misc_feature: Variant of the nucleotide sequence at SEQ ID NO 40134
atgcagtctatagagcaagcgagggcaacgggtgctggccgacaccgcgaaaggcatgcggcaggcgagagccaaagggtccaggtgtacgaggaagtcagtatgactagaaccaggcacaggtatccgatgatacaggcagcaaattgtgttcttatgtgaggaacagacaggagagaggtgcagctagtagttatgcgacatcggcaatgtgaacaatatacaaatcg

SEQ ID NO: 40137 - DNA, 705 bp, Muscodor strobelii
  misc_feature: SGI cDNA ID NO. 573982
  misc_feature: Encodes the peptide sequence at SEQ ID NO 40138
atgcatcctagtcgtgtatcggaggttctcctctgtcttatccaggccacctcaacagtgtctcaatacgttcatggtgctgcttgtccaagcacccaaaccgtggtctactggggtcaaaatggcgggggcactgtcgagaatgatcttgctacatattgtacgccgacatccggaatagacatcattgtgctagccttcttgtaccaattcggcaacgggaacagcatcccctccggtaccatcggccagtcgtgctcaattgacacttcgggccaaggcgagaattgcggctcggtcgcatccgccattgccacgtgccaggcccacggtgtgaaggtgattttgtcgctaggcggcgcagttggctcgtactcgttacagtcggcttcgcatgcccaaaggattggcaactacctatgggaagcctacggtaacgcgagtaatcaagcagtgggccgtcctttcgggaagacggtcgtggacggattcgactttaacatagagcacaatgacggcaatcaattctaccaggacatggtctcaacgctacggaacaagttcaagtcggatccagctagggagtattatatcaccggggcaccgcaatgccccatccccgagccaaatatgggcgttgtcatcaacggatctcagttcgactatttatggccgcagttttacaataataacaattacacgtga

SEQ ID NO: 40138 - protein, 234 aa, Muscodor strobelii
  misc_feature: SGI Peptide ID NO. 573982
  misc_feature (32)..(228): Pfam Id: PF00704 Pfam Desc: Glycosyl hydrolases family 18
  misc_feature (32)..(230): SWISSPROT Homolog: EC 3.2.1.14 Chitinase
MHPSRVSEVLLCLIQATSTVSQYVHGAACPSTQTVVYWGQNGGGTVENDLATYCTPTSGIDIIVLAFLYQFGNGNSIPSGTIGQSCSIDTSGQGENCGSVASAIATCQAHGVKVILSLGGAVGSYSLQSASHAQRIGNYLWEAYGNASNQAVGRPFGKTVVDGFDFNIEHNDGNQFYQDMVSTLRNKFKSDPAREYYITGAPQCPIPEPNMGVVINGSQFDYLWPQFYNNNNYT

SEQ ID NO: 40139 - DNA, 868 bp, Muscodor strobelii
  misc_feature: SGI EST ID NO. CUFF.97020.0
  misc_feature: Variant of the nucleotide sequence at SEQ ID NO 40137
ataataaggtccgtcgaacattttttgctagatactctcaatgcttgcattgtttcaagcagacagtataaggccacgattcatcttgagaataatacaatgcatcctagtcgtgtatcggaggttctcctctgtcttatccaggccacctcaacagtgtctcaatacgttcatggtgctgcttgtccaagcacccaaaccgtggtctactggggtcaaaatggcgggggcactgtcgagaatgatcttgctacatattgtacgccgacatccggaatagacatcattgtgctagccttcttgtaccaattcggcaacgggaacagcatcccctccggtaccatcggccagtcgtgctcaattgacacttcgggccaaggcgagaattgcggctcggtcgcatccgccattgccacgtgccaggcccacggtgtgaaggtgattttgtcgctaggcggcgcagttggctcgtactcgttacagtcggcttcgcatgcccaaaggattggcaactacctatgggaagcctacggtaacgcgagtaatcaagcagtgggccgtcctttcgggaagacggtcgtggacggattcgactttaacatagagcacaatgacggcaatcaattctaccaggacatggtctcaacgctacggaacaagttcaagtcggatccagctagggagtattatatcaccggggcaccgcaatgccccatccccgagccaaatatgggcgttgtcatcaacggatctcagttcgactatttatggccgcagttttacaataataacaattacacgtgagaccgcttccctatccatcaagtcacttcgttacctaacgagatggaccccgcgagaactgatt

SEQ ID NO: 40140 - DNA, 699 bp, Muscodor strobelii
  misc_feature: SGI cDNA ID NO. 573983
  misc_feature: Encodes the peptide sequence at SEQ ID NO 40141
atgtccttgggccctttcctggctccctcctttgcttgctcccctttcactgctcccctttcgtggctcttctttgcttgtccaagcacccaaaccgtggtctactggggtcaaaatggcgggggcactgtcgagaatgatcttgctacatattgtacgccgacatccggaatagacatcattgtgctagccttcttgtaccaattcggcaacgggaacagcatcccctccggtaccatcagccagtcgtgctcaattgacacttcgggccaaggcgagaattgcggctcggttgcatccgccattgccacgtgccaggcccacggtgtgaaggtgattttgtcgctaggcggcgcagttggctcgtactcgttacagtcggcttcgcatgcccaaaggattggcaactacctatgggaagcctacggtaacgcgagtaatcaagcagtgggccgtcctttcgggaagacggtcgtggacggattcgactttaacatagagcacaatgacggcaatcaattctaccaggacatggtctcaacgctacggaacaagttcaagtcggatccagctagggagtattataccaccggggcaccgcaatgccccatccccgagccaaatatgggcgttgtcatcaacggatctcagttcgactatttatggccgcagttttacaataataacaattacacgtga

SEQ ID NO: 40141 - protein, 232 aa, Muscodor strobelii
  misc_feature: SGI Peptide ID NO. 573983
  misc_feature (30)..(226): Pfam Id: PF00704 Pfam Desc: Glycosyl hydrolases family 18
  misc_feature (24)..(228): SWISSPROT Homolog: EC 3.2.1.14 Chitinase
MSLGPFLAPSFACSPFTAPLSWLFFACPSTQTVVYWGQNGGGTVENDLATYCTPTSGIDIIVLAFLYQFGNGNSIPSGTISQSCSIDTSGQGENCGSVASAIATCQAHGVKVILSLGGAVGSYSLQSASHAQRIGNYLWEAYGNASNQAVGRPFGKTVVDGFDFNIEHNDGNQFYQDMVSTLRNKFKSDPAREYYTTGAPQCPIPEPNMGVVINGSQFDYLWPQFYNNNNYT

SEQ ID NO: 40142 - DNA, 602 bp, Muscodor strobelii
  misc_feature: SGI EST ID NO. CUFF.97017.0
  misc_feature: Variant of the nucleotide sequence at SEQ ID NO 40140
tcttgctacatattgtacgccgacatccggaatagacatcattgtgctagccttcttgtaccaattcggcaacgggaacagcatcccctccggtaccatcagccagtcgtgctcaattgacacttcgggccaaggcgagaattgcggctcggttgcatccgccattgccacgtgccaggcccacggtgtgaaggtgattttgtcgctaggcggcgcagttggctcgtactcgttacagtcggcttcgcatgcccaaaggattggcaactacctatgggaagcctacggtaacgcgagtaatcaagcagtgggccgtcctttcgggaagacggtcgtggacggattcgactttaacatagagcacaatgacggcaatcaattctaccaggacatggtctcaacgctacggaacaagttcaagtcggatccagctagggagtattataccaccggggcaccgcaatgccccatccccgagccaaatatgggcgttgtcatcaacggatctcagttcgactatttatggccgcagttttacaataataacaattacacgtgagaccgcttccctatccatcaagtcacttcgttacctaacgaga

SEQ ID NO: 40143 - DNA, 1092 bp, Muscodor strobelii
  misc_feature: SGI cDNA ID NO. 573984
  misc_feature: Reduced expression when VOC is produced
  misc_feature: Encodes the peptide sequence at SEQ ID NO 40144
atgatcacgcccaatatctctatcaccgacccggttatcgatagaaacatccccctctctcacgatgacttcggaccacagatcgaggtatgcacgtgggctttagcggcgttggcgttgttttggttggcgttgaggatctattgcaagacgaggaaacatcggggtctatggtgggatgactatgttctgattgggtcctgggtctgtgttatcgcagcaaatgcagctacaggcgcagcggttggcctcggatggggcagacaaccttgggacgttccgcgaggacacttcccggatatactgctcgcactttttatatcgggtctgttttcgcttctcgcagcggcgtctagcaagacctccttcgcactcacgctgctgcgtatatctaatggctgggtcaagttcgtggtgtggtttttcattattacgatgaacatcgccatgggtattagtgcgattttcaactgggttcaatgtacaccagtccaaaagcttttcaatatatttctccctggtagttgctggccgagatcgactatcgtgcagtacagcgcttttgctgctgcttattccggtgccactgatatcgttctcgcgattctcccgatcacgatcctttggaacatgaacatgaacatgaaggaaaggttcggtgcatggtgtgccatgggtctcggaatctttgccggtatcatatcgttcgtgaagatctatgctctgacagggacgattgaggcaaacttctccgcttcagtacaactcaccgtcctttccattgcggaaacatgcgtcacaataatggcgtcctctatcccgatcttgcgcgcccttgcgcgagacaagtctgggcccacggccgtacagcttttcactctcaatgcaacacaattcctgacattaagacggcgctctaggtctcccactgattcggagcaagaggagaatgggattcgcacgaggttctggacgataaagagaaaaggatcggcgaggaaagtgccagtactgtcaaagattattgagaccgatgagctgtctccgggtatcattgacgaaccagtcaccagcgagaggagttttgtgtga

SEQ ID NO: 40144 - protein, 363 aa, Muscodor strobelii
  misc_feature: SGI Peptide ID NO. 573984
  misc_feature: Useful for introducing or modulating the production of volatile compounds
MITPNISITDPVIDRNIPLSHDDFGPQIEVCTWALAALALFWLALRIYCKTRKHRGLWWDDYVLIGSWVCVIAANAATGAAVGLGWGRQPWDVPRGHFPDILLALFISGLFSLLAAASSKTSFALTLLRISNGWVKFVVWFFIITMNIAMGISAIFNWVQCTPVQKLFNIFLPGSCWPRSTIVQYSAFAAAYSGATDIVLAILPITILWNMNMNMKERFGAWCAMGLGIFAGIISFVKIYALTGTIEANFSASVQLTVLSIAETCVTIMASSIPILRALARDKSGPTAVQLFTLNATQFLTLRRRSRSPTDSEQEENGIRTRFWTIKRKGSARKVPVLSKIIETDELSPGIIDEPVTSERSFV

SEQ ID NO: 40145 - DNA, 1437 bp, Muscodor strobelii
  misc_feature: SGI EST ID NO. CUFF.97080.0
  misc_feature: Variant of the nucleotide sequence at SEQ ID NO 40143
ctttcttttttgttgtcgttggtttttaatgttctaactctcattcgctcttttcgttgtgaacgatagtcaatgttgactttccttttcgaagttttgttgccaccgggctagttgcagtttggcacgcccgtactcttgaggagttcatttcggccatgatcacgcccaatatctctatcaccgacccggttatcgatagaaacatccccctctctcacgatgacttcggaccacagatcgaggtatgcacgtgggctttagcggcgttggcgttgttttggttggcgttgaggatctattgcaagacgaggaaacatcggggtctatggtgggatgactatgttctgattgggtcctgggtctgtgttatcgcagcaaatgcagctacaggcgcagcggttggcctcggatggggcagacaaccttgggacgttccgcgaggacacttcccggatatactgctcgcactttttatatcgggtctgttttcgcttctcgcagcggcgtctagcaagacctccttcgcactcacgctgctgcgtatatctaatggctgggtcaagttcgtggtgtggtttttcattattacgatgaacatcgccatgggtattagtgcgattttcaactgggttcaatgtacaccagtccaaaagcttttcaatatatttctccctggtagttgctggccgagatcgactatcgtgcagtacagcgcttttgctgctgcttattccggtgccactgatatcgttctcgcgattctcccgatcacgatcctttggaacatgaacatgaacatgaaggaaaggttcggtgcatggtgtgccatgggtctcggaatctttgccggtatcatatcgttcgtgaagatctatgctctgacagggacgattgaggcaaacttctccgcttcagtacaactcaccgtcctttccattgcggaaacatgcgtcacaataatggcgtcctctatcccgatcttgcgcgcccttgcgcgagacaagtctgggcccacggccgtacagcttttcactctcaatgcaacacaattcctgacattaagacggcgctctaggtctcccactgattcggagcaagaggagaatgggattcgcacgaggttctggacgataaagagaaaaggatcggcgaggaaagtgccagtactgtcaaagattattgagaccgatgagctgtctccgggtatcattgacgaaccagtcaccagcgagaggagttttgtgtgagttctttgggaccatgcgcggcgttcttggtaggatacaaagtggagctcgatcacgatatctcgttcagcaaatgggacatgcatatgcggcgtaaaggaacctgggaatcgtagaagtgtaggatcatagggcatgataattaatattgagataaatatgactaataatacttcaaccaatcgcc

SEQ ID NO: 40146 - DNA, 1335 bp, Muscodor strobelii
  misc_feature: SGI cDNA ID NO. 573985
  misc_feature: Encodes the peptide sequence at SEQ ID NO 40147
atgtcggccgcaaagcgacgcgcagatgagaatctgtcgcttgtggacgtacacagtttagctctgcaacacctcttccctgcggcgggagaagagaagatcagagacctgcttcagatctccggcaataacctgctttgctgctttgacgttctcgtagcccgtaagtatcaattggccttgccgccgaacaagcgccaggacatggctgggacgaagacgcacaacgcggacaatttgaaagatcccaccactgcccaagatctggttccagtgcaagagcccactgatggccaattgtgcgttcttgctcaagaggccgcagtcgttgcgcaggagcctgttgctgcacaagcgcctgccctcgttcaacaacctcccgtcgtccaacagcctgttgctgctaccgcgcagatgacaatagccgccgcagccttagattatctatcaacctactacacaaatcgcacccacgcaaagccgagtagtatcgtccaaactacagttacctcaagtgtccccgctgtcagcaacatcgcagatcgacccctgtctgcttccccggatacgcccacgcttacgatgacctcttcttctccctattcctcagctctgtgtgattctctccccatctccgcctcttcggacagaaaaggcttttacgccggcaaacctgtctcaatggattcaagcgacagagaatggtcgctagcattcgctgaccgagttgactggcaaagccgtgcgcaagaacgattggcacaactgcatgagtccgctagaagaaagattgcaaatggtacatttcgcaagaagtcgagaaatgagattgccagtaccgttcaacgagtggagcctaaatcgatcggagaggtcaccaatctaacatatgtacttgctgttaatgaagagagagtcgtcaacttgaatgggctcgacttcagcgacagaggcctcacccgaagcgtggagacgtgcggcacgttggctggtagcgaatatgttgacatatatgtggtgaaacccatcaacggacaataccccgagttctgtcatcttgcactaccgagtaaggaggcagctcgcgctgtcgtacggaagtcgacgcaaatgcgcgctcgtaaaggccatcgtaatattcgagcctcgcatgatgtaatcgactggaccgagtcccaggcttggcacatgatcaaaaagcccgctccggacgaccctgtgggagaaaaggcaatgcaacgggcccgagacagattacacaaacacatggtcgatacaatcggaattcctgatgataccatactcacggacaacggactcgagaagagacgttga

SEQ ID NO: 40147 - protein, 444 aa, Muscodor strobelii
  misc_feature: SGI Peptide ID NO. 573985
MSAAKRRADENLSLVDVHSLALQHLFPAAGEEKIRDLLQISGNNLLCCFDVLVARKYQLALPPNKRQDMAGTKTHNADNLKDPTTAQDLVPVQEPTDGQLCVLAQEAAVVAQEPVAAQAPALVQQPPVVQQPVAATAQMTIAAAALDYLSTYYTNRTHAKPSSIVQTTVTSSVPAVSNIADRPLSASPDTPTLTMTSSSPYSSALCDSLPISASSDRKGFYAGKPVSMDSSDREWSLAFADRVDWQSRAQERLAQLHESARRKIANGTFRKKSRNEIASTVQRVEPKSIGEVTNLTYVLAVNEERVVNLNGLDFSDRGLTRSVETCGTLAGSEYVDIYVVKPINGQYPEFCHLALPSKEAARAVVRKSTQMRARKGHRNIRASHDVIDWTESQAWHMIKKPAPDDPVGEKAMQRARDRLHKHMVDTIGIPDDTILTDNGLEKRR

SEQ ID NO: 40148 - DNA, 999 bp, Muscodor strobelii
  misc_feature: SGI cDNA ID NO. 573986
  misc_feature: Encodes the peptide sequence at SEQ ID NO 40149
atggcgaatgtcggacgagcaatgccgggtaccaagcccccttcggacgagactcaggatctctcgttgaccgacatgtacgaggtgtcactgggccttgtgttcccggctgcagatcgagaccggatccgtgacgtcttgatcgcagtcagcaacgattactacctcgcctggaaggctctagaatccgaccatgaacccgtatctagctccgtcaagcgtgcccgtcacgttttacccaagccttccactcatgactcatccactgagcatctcactaccgccgatacattactagatgtgtcgactaagtttgatctacctctccatctcgtcgagcgccaattcccccagcagactgctgttgtccctgagactctcaccactctctcccgtcccttgggtcacaatgaactgtcacacagcgttgggggagtagctttttcgatcaattacaagacctcgtacatcttggagattcaaggactcgacgttcgttacgataaatcccagatcatgaaggcattcagcctcagagctgagtgcttcttggacttctactggccaaaagactatgggcgaatagtggaaggatcagccaagaattggtgccatttgggagttcagcacaaagatgacactgctaagatgatgcgacgtcttcacggattcactttcatggacacgcgcaaggtcatcaacatcaccgcgcttgccccccaacacaataccagtcgactagatgaaaatgacatcgccaactcggacggctggtgctaccgtctgaacgacgctcccaattccactccggagtcactcacccatttattgggctcctttgaatacggatggaccggagaggaagagcccattgactgccgtgaagagattatgaactggaatcaagcgatgcgggactatatgcgtggtttaggtgattatcccgagcccgaaatgtccaatgacaatgacaaaagcaaggggaatgaggatgtctga

SEQ ID NO: 40149 - protein, 332 aa, Muscodor strobelii
  misc_feature: SGI Peptide ID NO. 573986
MANVGRAMPGTKPPSDETQDLSLTDMYEVSLGLVFPAADRDRIRDVLIAVSNDYYLAWKALESDHEPVSSSVKRARHVLPKPSTHDSSTEHLTTADTLLDVSTKFDLPLHLVERQFPQQTAVVPETLTTLSRPLGHNELSHSVGGVAFSINYKTSYILEIQGLDVRYDKSQIMKAFSLRAECFLDFYWPKDYGRIVEGSAKNWCHLGVQHKDDTAKMMRRLHGFTFMDTRKVINITALAPQHNTSRLDENDIANSDGWCYRLNDAPNSTPESLTHLLGSFEYGWTGEEEPIDCREEIMNWNQAMRDYMRGLGDYPEPEMSNDNDKSKGNEDV

SEQ ID NO: 40150 - DNA, 928 bp, Muscodor strobelii
  misc_feature: SGI EST ID NO. CUFF.97045.0
  misc_feature: Variant of the nucleotide sequence at SEQ ID NO 40148
gttttacccaagccttccactcatgactcatccactgagcatctcactaccgccgatacattactagatgtgtcgactaagtttgatctacctctccatctcgtcgagcgccaattcccccagcagactgctgttgtccctgagactctcaccactctctcccgtcccttgggtcacaatgaactgtcacacagcgttgggggagtagctttttcgatcaattacaagacctcgtacatcttggagattcaaggactcgacgttcgttacgataaatcccagatcatgaaggcattcagcctcagagctgagtgcttcttggacttctactggccaaaagactatgggcgaatagtggaaggatcagccaagaattggtgccatttgggagttcagcacaaagatgacactgctaagatgatgcgacgtcttcacggattcactttcatggacacgcgcaaggtcatcaacatcaccgcgcttgccccccaacacaataccagtcgactagatgaaaatgacatcgccaactcggacggctggtgctaccgtctgaacgacgctcccaattccactccggagtcactcacccatttattgggctcctttgaatacggatggaccggagaggaagagcccattgactgccgtgaagagattatgaactggaatcaagcgatgcgggactatatgcgtggtttaggtgattatcccgagcccgaaatgtccaatgacaatgacaaaagcaaggggaatgaggatgtctgagagggttcagatctcatggttatctgcctgatctctgtgtctatgtcttgtcactctgtgtacacaaactacatagtacatagcaaaagagatgtggagcactgcctgttttcaagcagacggaggaaaacagttactggttgacaaacggttaacaccc

SEQ ID NO: 40151 - DNA, 1794 bp, Muscodor strobelii
  misc_feature: SGI cDNA ID NO. 573987
  misc_feature: Encodes the peptide sequence at SEQ ID NO 40152
atgtcggctgccaagagaagcgccgacgacgacttgtccctagagggcatccatgcactggctctccagcacctatttccgtcagcaaaatccgacgaaatagatacttatctcgcgcagtgcaacaatgatctccatgaagtcgtgactatcttcgaatatactggccacgaactcaaaacaccaggcgctaaacctggcccgaagctaccagcggattggcatgattttactctcgaagagatttatgtcatgaccctccagcatttctttccatctatcgcagaagactcgctctgcgagcttctggaccgcgccggcggcgatctactgggctgctgcaacgatctcgtcaaacgtcgaggctatcaaatagcacaaccgcccaagaaacgtcctgcattcgacctgcaagaccgtagtacccgcggtcttccgcgctcctccatggagtactggttctgggactggctgcttgctaaggtgtttccttcgagcacctatctccagcgattccgtgcaatgcatggtgtccctctgatccatgcctttgccacactgcgagcatcgactcacatttcatcctctgtcgacacttgcaaagcactagatgtctgtttctccgatcaaccggagcaagccctaaagttttgggctcccgagggctttgctgaactggtaggctgggaggctttcgagaatgtatctacccaggagaccgtaggcggccaccctgcccaagcaatcgtgaacgatggctcagctcagatccaagaacctgttctccctactaccacgacatcagtcgagcccgtctccgcttctgccgatgccgtaacgacttcggtcgccgcacttaactatctgcaagcctaccattcaggcaaccacgatgcccaggctagtaccatctttcccgcgcctgttgcaccggcggccgaaccttctgcagcgttatcgttctttgcagctactgtattagaacatgacgatccgaacacgacctccagtattctctatacgtcgggactccctcctttgcctgttggccctccctccgtagtttcgtctgaacgaacaatttcgacccctcgtactggctcgcccgatcccacgatctctcgcggcggaacagtctctccgtatcgcacaatttcccgctatcggacagtgtctcctgatcgcacaatcactcccgaccgcacaccctctcctgatcgtagaatctcgtccaatagcacaatctcttccgatcgggcggtctcaccgatcgtcccagccatcccaactgtccctgacgaagcaactctgacacctgctgcgccggatcacagtacttgtctccttcctcccaatcacggtactcatctggcttgtgtacatctaatgggcaaacctactccagagtcttactctcaggccgttgccgagcacagagtaatcaaagtcagccgcctctatactcattataagccttacgagctggtacatcatcttgccaggttcattcgcttggactcggtcacgttctactggcgtagatacgataaggaagcggatatacaccgtgactggtgtcatatcgcagttccggaagctggacatgtcgtggccgccgccatgcaggacttgaaaggaaagacactgcctgcagacgccagaaagcacaagacccgcactactagagttcgtaaagatggtgggattccggaggacaagatcgattgggacatatcccaaaccgttaggattgttccacccaaagagcctgccgaggagagtgagaattactga

SEQ ID NO: 40152 - protein, 597 aa, Muscodor strobelii
  misc_feature: SGI Peptide ID NO. 573987
MSAAKRSADDDLSLEGIHALALQHLFPSAKSDEIDTYLAQCNNDLHEVVTIFEYTGHELKTPGAKPGPKLPADWHDFTLEEIYVMTLQHFFPSIAEDSLCELLDRAGGDLLGCCNDLVKRRGYQIAQPPKKRPAFDLQDRSTRGLPRSSMEYWFWDWLLAKVFPSSTYLQRFRAMHGVPLIHAFATLRASTHISSSVDTCKALDVCFSDQPEQALKFWAPEGFAELVGWEAFENVSTQETVGGHPAQAIVNDGSAQIQEPVLPTTTTSVEPVSASADAVTTSVAALNYLQAYHSGNHDAQASTIFPAPVAPAAEPSAALSFFAATVLEHDDPNTTSSILYTSGLPPLPVGPPSVVSSERTISTPRTGSPDPTISRGGTVSPYRTISRYRTVSPDRTITPDRTPSPDRRISSNSTISSDRAVSPIVPAIPTVPDEATLTPAAPDHSTCLLPPNHGTHLACVHLMGKPTPESYSQAVAEHRVIKVSRLYTHYKPYELVHHLARFIRLDSVTFYWRRYDKEADIHRDWCHIAVPEAGHVVAAAMQDLKGKTLPADARKHKTRTTRVRKDGGIPEDKIDWDISQTVRIVPPKEPAEESENY

SEQ ID NO: 40153 - DNA, 1146 bp, Muscodor strobelii
  misc_feature: SGI cDNA ID NO. 573988
  misc_feature: Encodes the peptide sequence at SEQ ID NO 40154
atggatgaccaattcaacggtcgtactgacgacgacctgttcgccgacgactttgagcccatccagacacccgcagcggcatctaatccagggcccgtcactgcgaatacatccgtacccacggccaccgatgcgcacccagaacctgctgctgctcagcctgccaaacctgtcaagacgttggccagttcgcgccacgcccccaaaccagcacaccagccgcgcccgcgcaagcactcgcccaagaagcctccgcctgcaaacacacctgccaatatatccgcctctgctgctccagcagcctcagtcactgaagatgcacccacctctgcatcgactacagacgaactagctgccccgactgccccagcggtgcccacaggtccatcagcgcccacgcgtggccagaatacagctctcgcagaccgcatagcatccggcgccaatccgcgtaccaagctcactgactctgagctcgccgacaagatggagcgcatgcgcatcctttccgctgagaaggcccgcaagttcgagcaagctgagcaggactctcgctctcacgccatcgcctacgagaagggcatggaggaagcccgcaagcgacgcgcagaagaggccgagcgcaggaagagaggggaagaagaaagacgagcaatggaccaggagcgtgctgccaaccgggagcgcaagctcaaagctatgggcgccaaggacgggggatgggacgagggcaagaatgtcgaggaggagaggacaagaggcttcaggggagctaatggaggcatccgaggcgcgaggaggggtccagactcagacgaggtcgtcagggaattcgcacccgacgaattccgaggacgaggaaggggaaggggaccgagaggtgctagaggcggacgaggtggacgaggaggctaccgcgacgatgacagaggaccgagagaggctacgccgaatcagccacagaagaaggctcccgagcaggctcctccgaaggcagacgatttccctgccctccccggaacgacgaagaagttggacacgtcagtagagccgcctaagatcccgtcgctttcaccgggtcccaattccccgccgatagggaagtgggatgacgagatggccgcccttgacgagaagatgggatag

SEQ ID NO: 40154 - protein, 381 aa, Muscodor strobelii
  misc_feature: SGI Peptide ID NO. 573988
MDDQFNGRTDDDLFADDFEPIQTPAAASNPGPVTANTSVPTATDAHPEPAAAQPAKPVKTLASSRHAPKPAHQPRPRKHSPKKPPPANTPANISASAAPAASVTEDAPTSASTTDELAAPTAPAVPTGPSAPTRGQNTALADRIASGANPRTKLTDSELADKMERMRILSAEKARKFEQAEQDSRSHAIAYEKGMEEARKRRAEEAERRKRGEEERRAMDQERAANRERKLKAMGAKDGGWDEGKNVEEERTRGFRGANGGIRGARRGPDSDEVVREFAPDEFRGRGRGRGPRGARGGRGGRGGYRDDDRGPREATPNQPQKKAPEQAPPKADDFPALPGTTKKLDTSVEPPKIPSLSPGPNSPPIGKWDDEMAALDEKMG

SEQ ID NO: 40155 - DNA, 1824 bp, Muscodor strobelii
  misc_feature: SGI EST ID NO. CUFF.97077.0
  misc_feature: Variant of the nucleotide sequence at SEQ ID NO 40153
agccagggtagtgccccgcctgttcattgcgtcagggcaagcatcggccattgaattctggggacctcaacattcaacgtcttacattcacctgcatattaggtaatacctgaagcttttagacatctctcttcacaacatcgctttcccgctcttgcttcacatttgtcgctccaatcgctccaatccgcatcccgtcttgcagatataccatccataagcattagtgatccagtcgtattttgtcgtctgtcgcgatggatgaccaattcaacggtcgtactgacgacgacctgttcgccgacgactttgagcccatccagacacccgcagcggcatctaatccagggcccgtcactgcgaatacatccgtacccacggccaccgatgcgcacccagaacctgctgctgctcagcctgccaaacctgtcaagacgttggccagttcgcgccacgcccccaaaccagcacaccagccgcgcccgcgcaagcactcgcccaagaagcctccgcctgcaaacacacctgccaatatatccgcctctgctgctccagcagcctcagtcactgaagatgcacccacctctgcatcgactacagacgaactagctgccccgactgccccagcggtgcccacaggtccatcagcgcccacgcgtggccagaatacagctctcgcagaccgcatagcatccggcgccaatccgcgtaccaagctcactgactctgagctcgccgacaagatggagcgcatgcgcatcctttccgctgagaaggcccgcaagttcgagcaagctgagcaggactctcgctctcacgccatcgcctacgagaagggcatggaggaagcccgcaagcgacgcgcagaagaggccgagcgcaggaagagaggggaagaagaaagacgagcaatggaccaggagcgtgctgccaaccgggagcgcaagctcaaagctatgggcgccaaggacgggggatgggacgagggcaagaatgtcgaggaggagaggacaagaggcttcaggggagctaatggaggcatccgaggcgcgaggaggggtccagactcagacgaggtcgtcagggaattcgcacccgacgaattccgaggacgaggaaggggaaggggaccgagaggtgctagaggcggacgaggtggacgaggaggctaccgcgacgatgacagaggaccgagagaggctacgccgaatcagccacagaagaaggctcccgagcaggctcctccgaaggcagacgatttccctgccctccccggaacgacgaagaagttggacacgtcagtagagccgcctaagatcccgtcgctttcaccgggtcccaattccccgccgatagggaagtgggatgacgagatggccgcccttgacgagaagatgggatagtatatgtccaagcgaggttcacaggatgacgagatcccggagcgtcatcacggcgagctccaggcgatgggtaagagaaagggcaacagtgactaatctagtgaacgcacagaagaacaacataagcagaaagcgtgtttctacatggcatcggaagactgggaattgataccaccacaatcagattataatatataaaggagcgatatcttcctcaatgatgatatcaatagccagtcccgaagcgatctaactacgtagcctctcagattaaaatggtcgaccacgtaggcttatattgctgtgttttcttgtccgaagatcacctaagtgcttggtttttctggcagtatccatatcgttccaaaaagagtgtttgtctcaggcaaacacaaaaagtgtatgtacatatataaaaaag

SEQ ID NO: 40156 - DNA, 423 bp, Muscodor strobelii
  misc_feature: SGI cDNA ID NO. 573989
  misc_feature: Encodes the peptide sequence at SEQ ID NO 40157
atggccgatgacaacgccacggtccttctccccggcaaggacatgatcctgtccgcgctcaatctagtgctcaacagactgatcggcagggctttcacggctcccacgcaggagcaaatcaatgactccctcatttcattaggagcttttaatgtcttccatgccattcttcgccgcgcggaacttcccatcccggcttcagatattgacgcgtttgagcgcatggtatcttgcttggagtcggacgatttcgatcgattttgtttcatgctgccagagcctgtaggcgatgagcttctcaaatgcgtccccgccaagaagcctgctaagcattccgctggaatcagcggtgatcgagacaagacgcctgtcgccgactcagatagcgctgccgagcgcgccgatgacaaggcaccagagtag

SEQ ID NO: 40157 - protein, 140 aa, Muscodor strobelii
  misc_feature: SGI Peptide ID NO. 573989
MADDNATVLLPGKDMILSALNLVLNRLIGRAFTAPTQEQINDSLISLGAFNVFHAILRRAELPIPASDIDAFERMVSCLESDDFDRFCFMLPEPVGDELLKCVPAKKPAKHSAGISGDRDKTPVADSDSAAERADDKAPE

SEQ ID NO: 40158 - DNA, 423 bp, Muscodor strobelii
  misc_feature: SGI cDNA ID NO. 573990
  misc_feature: Elevated expression when VOC is produced
  misc_feature: Encodes the peptide sequence at SEQ ID NO 40159
atggcttcccacgcaaaactcactctcacccattatcgaaatgcagatcgcaccgtagaagagacgatgaactggatcgtcacgcaccacctgccacttgccattccagcaatgaagaaatatggtgtgattacatactctatcttcaaaactcctacagaagtcaatatgggtctgaagcagcaattttccgccgactctcttcgaaagaattggacgactgcagattgtgactgcttcattgagtacacgcttacgagtgttgagcaattcatgcctatcttgaatgatccagagtgggaaaagtcgctcgagggacaagagaactggattgataccagtagatctatgatgtctcttggagaggtgacaccttacctgctagaatctggcgagatggtgaatgtgccagcggctacatga

SEQ ID NO: 40159 - protein, 140 aa, Muscodor strobelii
  misc_feature: SGI Peptide ID NO. 573990
  misc_feature: Useful for introducing or modulating the production of volatile compounds
MASHAKLTLTHYRNADRTVEETMNWIVTHHLPLAIPAMKKYGVITYSIFKTPTEVNMGLKQQFSADSLRKNWTTADCDCFIEYTLTSVEQFMPILNDPEWEKSLEGQENWIDTSRSMMSLGEVTPYLLESGEMVNVPAAT

SEQ ID NO: 40160 - DNA, 903 bp, Muscodor strobelii
  misc_feature: SGI EST ID NO. CUFF.97084.0
  misc_feature: Variant of the nucleotide sequence at SEQ ID NO 40158
gccggaagcagcggcatctcgttgatgagacgttttctgattgggcgaatctgcactgcgccgtcactaacatgcatccaattgtggattggaggattgccttgagaggggtgatgcaagggggaaaacggaaaggtcaaacataaggcgttcagtcacatcatcgagaaaaatgatttttgtctcacaagtaggcttccaataaaacaaaatatcaacaacagatactgctctcattcattaacaaagtcatggcttcccacgcaaaactcactctcacccattatcgaaatgcagatcgcaccgtagaagagacgatgaactggatcgtcacgcaccacctgccacttgccattccagcaatgaagaaatatggtgtgattacatactctatcttcaaaactcctacagaagtcaatatgggtctgaagcagcaattttccgccgactctcttcgaaagaattggacgactgcagattgtgactgcttcattgagtacacgcttacgagtgttgagcaattcatgcctatcttgaatgatccagagtgggaaaagtcgctcgagggacaagagaactggattgataccagtagatctatgatgtctcttggagaggtgacaccttacctgctagaatctggcgagatggtgaatgtgccagcggctacatgagcagtccagctatctctcaagtaaagtacaatcggattgtgaaaagcaggtctttgtgtgttggtcaatatgtcgggaaaagtgatccacttacgcgtaatgtctaaatcgtacaaacacaacacagacagcagtcaaacaagcattgtttgataattgtagttgctccataattatgaaattctgctctttgcaagactgcgcatagatgccatgaatcccatgctcg

SEQ ID NO: 40161 - DNA, 549 bp, Muscodor strobelii
  misc_feature: SGI cDNA ID NO. 573991
  misc_feature: Encodes the peptide sequence at SEQ ID NO 40162
atgcttcttgtgagcagcgtcgcctatcagcattcagcccacgatttcctggctgagatgctcggtgccgtgttcccttctgccaattacaaggagattcgcaatgcgttctccaaggacggaaataaaaccgttaaggaggctgttaagtacttaactgagcgcggcgtcgcgttccgtcccttgccggaccttcgcaaaagacttgcctcggcaaatccttgggatcgaggatcttcggaagctctcctcgccgaccaattcccttccacatctgaagcggagcgagatgatgctttgaccgggtgcccggtactgttcgtgggcactgctatccgtcatttggagtgtattgaatacctcgacgcacgactgacctcggctattcgcgaggaactcattgaggctcgtgcccaagcttgtcgagcttcaagccagcgccgcgtcattaaagacgacgtgattgattggaccgcagctgaatgcttcgttgtcaccggagatgatgaacgtaacattagcgatgctggtaccaacccgaaagtctaa

SEQ ID NO: 40162 - protein, 182 aa, Muscodor strobelii
  misc_feature: SGI Peptide ID NO. 573991
MLLVSSVAYQHSAHDFLAEMLGAVFPSANYKEIRNAFSKDGNKTVKEAVKYLTERGVAFRPLPDLRKRLASANPWDRGSSEALLADQFPSTSEAERDDALTGCPVLFVGTAIRHLECIEYLDARLTSAIREELIEARAQACRASSQRRVIKDDVIDWTAAECFVVTGDDERNISDAGTNPKV

SEQ ID NO: 40163 - DNA, 1251 bp, Muscodor strobelii
  misc_feature: SGI cDNA ID NO. 573992
  misc_feature: Encodes the peptide sequence at SEQ ID NO 40164
atgctaccaagtttgactgtgctactgctgcccgcgcttgttgctcgggtgcaagcggcagcaatcgagacacctcgcgatggatggcgatcgaaaatagaaatcattcgcaacccggtttatcctctcgatgtcgtcgaccaacttgaagaagcgacgatggataaggtggacgagtacatgacaaagaagatcgccatgaagatgaacaataactgtacgttggagaatgcatcggttcgacgagaatggagcgatatgcccgagacccagcgccaagaatacatcgccgctgtgatgtgtttgtcgaagcttccgtcaaaggcagacaagaccaagtatcccggcgctatctcccggtacgatgatttcgtggcattccacatgacccacgcaatgcagcttcatgacaacatgcatctcttcggtgcccacaagtactttgtctacttatttgaaaaggctttgcgtgatgagtgtggctacactggttatcatccatacatgaactacgaccggtattcgaaagatcctctcacttcgcccctcttcaacggcaacgcctccagcatgggcgggcaaggagctctcgagccaacctacaagggtgttgcgcaaccgggtcggactcccaatattattaagtctggtggcggaggaggatgcttgacctctgggcctttctccgacctagaagtacatctcggaccaacgagcatggcaacaggcaccaatctgcccaaaaacccaaagtccgatggcacaggcctaaacaaacgatgcctgcgacgcgatgtcaatgtaaatgcgatcatgggagcaaccgcggatcgatgcctgagtctcttcaatcacacagacatggatggcttctacaatcaacttcttgggacgcctccgccaaagaatgatccatatccatggggggtccacactgccggccactatgttgcggctgttgatcccggtggtgatgctatgacatctcctggtgaccctctgttctacttccatcacgtctccttggaccgcctttggtggatctggcaaatgcaagaccctacaaaccgggtctacgccattccgttcgtaaatgagacgatcacgatgcccatgaagcgaggagagatggcgacagacccgcacaacgtcactgttgacatggagtggcttggccctccgattaaccttctcgaaactcatgatgcgcttggcggaaatgcaggaaaattctgtgttgtatacgtctga

SEQ ID NO: 40164 - protein, 416 aa, Muscodor strobelii
  misc_feature: SGI Peptide ID NO. 573992
  misc_feature (328)..(350): Pfam Id: PF00264 Pfam Desc: Common central domain of tyrosinase
  misc_feature (79)..(356): SWISSPROT Homolog: EC 1.14.18.1 Monophenol monooxygenase
MLPSLTVLLLPALVARVQAAAIETPRDGWRSKIEIIRNPVYPLDVVDQLEEATMDKVDEYMTKKIAMKMNNNCTLENASVRREWSDMPETQRQEYIAAVMCLSKLPSKADKTKYPGAISRYDDFVAFHMTHAMQLHDNMHLFGAHKYFVYLFEKALRDECGYTGYHPYMNYDRYSKDPLTSPLFNGNASSMGGQGALEPTYKGVAQPGRTPNIIKSGGGGGCLTSGPFSDLEVHLGPTSMATGTNLPKNPKSDGTGLNKRCLRRDVNVNAIMGATADRCLSLFNHTDMDGFYNQLLGTPPPKNDPYPWGVHTAGHYVAAVDPGGDAMTSPGDPLFYFHHVSLDRLWWIWQMQDPTNRVYAIPFVNETITMPMKRGEMATDPHNVTVDMEWLGPPINLLETHDALGGNAGKFCVVYV

SEQ ID NO: 40165 - DNA, 522 bp, Muscodor strobelii
  misc_feature: SGI cDNA ID NO. 573993
  misc_feature: Encodes the peptide sequence at SEQ ID NO 40166
atgtctgacttcaaccgtctctcgaaagccgacaaaaactacgtctacctgtcaagcgtgttcccgaatgccactgaacaacaaaagcgccatgtgcttacttcggcaaacggcgatctgtacctggcctgggatatcatggcgacgcaagaaaacgttccacctcttctcccccctgttgagaaccagcgtccggccaagcgatctcgaccagccgaggaagtagagccccagaagaaacagaaactcgcgtccgatgttcaccacgccgatgacacacttggcaatacttctgctcatacgggctattccccacatccaaccatcagcaattctcccgagttccccgccgctggacccgagcaaaatgccaacaggagtcggaactggattttgctttcggctccagaaatatctctcattactgtgatgattcagatgattgtccagatgattgtccgcgttgtgccgggctcagatgatacgtcgatcattgccgtcctcaccacttttaacgtctag

SEQ ID NO: 40166 - protein, 173 aa, Muscodor strobelii
  misc_feature: SGI Peptide ID NO. 573993
MSDFNRLSKADKNYVYLSSVFPNATEQQKRHVLTSANGDLYLAWDIMATQENVPPLLPPVENQRPAKRSRPAEEVEPQKKQKLASDVHHADDTLGNTSAHTGYSPHPTISNSPEFPAAGPEQNANRSRNWILLSAPEISLITVMIQMIVQMIVRVVPGSDDTSIIAVLTTFNV

SEQ ID NO: 40167 - DNA, 510 bp, Muscodor strobelii
  misc_feature: SGI cDNA ID NO. 573994
  misc_feature: Encodes the peptide sequence at SEQ ID NO 40168
atgtctgccgcttcctctgacagttgtcccgcaggccctcagaatcccgaccccactgcgactgccacgttcgatgtcaatcccagcgccgtcattaataccccttcgtcgctgaccatgccgtctgtcgacaattacatgaaggactactgggatgagctcgggtgcctatacaaagacgccatcaacgcctttggcggcccgattctgcgcgagcgaattatcaacggtccagtcatgatcaagaagtctgacatcccttggaccgaccacagccagtttccatatagaacgaactttacccattgccccgtatatccacatatggtcttcgttagcgaagatggcaccaccgagaagctgaaattcaccgccgagcatcgcctctcaatacccctgtcatttgtcggtactggcgaggagctgaccctccaggccatggacaagaagactcgcgaagacaaggagcgtcaatccgatggagaagccgccgacaaaactacagcctag

SEQ ID NO: 40168 - protein, 169 aa, Muscodor strobelii
  misc_feature: SGI Peptide ID NO. 573994
MSAASSDSCPAGPQNPDPTATATFDVNPSAVINTPSSLTMPSVDNYMKDYWDELGCLYKDAINAFGGPILRERIINGPVMIKKSDIPWTDHSQFPYRTNFTHCPVYPHMVFVSEDGTTEKLKFTAEHRLSIPLSFVGTGEELTLQAMDKKTREDKERQSDGEAADKTTA

SEQ ID NO: 40169 - DNA, 255 bp, Muscodor strobelii
  misc_feature: SGI cDNA ID NO. 573995
  misc_feature: Encodes the peptide sequence at SEQ ID NO 40170
atgcagctcctcaactctttgttcctcgggctcggcctcgtgtccgccattgaggctacctctatctacgttgcgcacttcaagtttgaaggaaacgccttgtccatctctatcattgataccccggcaggttacgatgccttcaagctgtgcacgttcaagacccagaatccggctactctggtagccgagggtcaacaaatcattgtcggccctcccactcctgttcttagcgtcacttgcaaggctccttaa

SEQ ID NO: 40170 - protein, 84 aa, Muscodor strobelii
  misc_feature: SGI Peptide ID NO. 573995
MQLLNSLFLGLGLVSAIEATSIYVAHFKFEGNALSISIIDTPAGYDAFKLCTFKTQNPATLVAEGQQIIVGPPTPVLSVTCKAP

SEQ ID NO: 40171 - DNA, 1308 bp, Muscodor strobelii
  misc_feature: SGI cDNA ID NO. 573996
  misc_feature: Elevated expression when VOC is produced
  misc_feature: Encodes the peptide sequence at SEQ ID NO 40172
atgaagctctcttgcgtcttggccttggcggcgctcgccaacgcgtgtctcctgcccgaagagcgcgccggcggcccaattcgtcgactcaaccgacgtcagggaaatactggaaaggccgttggaactggtgatcgattttcagccgggtctaaattccctcggggaattggtagcggcaatgcaaccgacatgacgacgatcatcaacgtgaacgaggttgcaacgggaattcagggcctcctaaaagagtatgggactgcaatttcaagcttcgcgttgcctgccaagacgtacgagggacgcacggtatggcttacgggtgtccaattcggcaccaatcctcctcacatctatatcaacggtggtattcacgcacgcgaacgtggctcgcacgataatgtgctctactggatcagcgatctgctgtatgcccagaaatatggcaaagggcttacatatggctccaagagctacacgaacgcccaggtgctcaaggttctaggtgctggaatcgttgcggtgcctctcagcaaccccgacggaaccaactatgatcaaacaagcaattcttgctggcgtaagaatcgtaacccaaaaagcggcacaggttcaagtgcgggtgtagacttgaatcgcaatttcgacttcgcatgggatccgtcgaaatgggcttcgagtgttaggaacgaggttgcctccagttcagcgtcttcggaagtgttccgcggtaccgccgcattcagcgagccagagactgtgagtagcgaacgacaaggcatcaaatatgtcctcgacacatacagcaaagtacgctggtacatcgacttgcacagctacgcaggagatgtcctctacagctggggaagtgatactgatcagagcacgcaaacctacaaaacattcctcaacgcaacatataactcaattcggggattgacatcagataacccctcgactcaatacggcgagtacatatcggcagcagacttgacgaacgccaagaacgtcggtacgaagctcggtagtgccatgagcgattcgaccggcaacgagtacaccgtgatgcaaagcgcctatctatatccgacaagcggcgcctctgacgactacgctttctcccggcacattgctaatccgtcgctcaataaggtctatgcttacaccgtagaattcgggtttgggaacaatgcagcttcgtgccctttctatcctaccgctgctcaatatacaaatagcttgaaggagacgaacgcgggtttcatggatttcgttctggccgcagtcgacaccgggctagaaggctag

SEQ ID NO: 40172 - protein, 435 aa, Muscodor strobelii
  misc_feature: SGI Peptide ID NO. 573996
  misc_feature (74)..(420): Pfam Id: PF00246 Pfam Desc: Zinc carboxypeptidase
  misc_feature (175)..(420): Pfam Id: PF00246 Pfam Desc: Zinc carboxypeptidase
  misc_feature (70)..(392): SWISSPROT Homolog: EC 3.4.17.18 Carboxypeptidase T
  misc_feature: Useful for introducing or modulating the production of volatile compounds
MKLSCVLALAALANACLLPEERAGGPIRRLNRRQGNTGKAVGTGDRFSAGSKFPRGIGSGNATDMTTIINVNEVATGIQGLLKEYGTAISSFALPAKTYEGRTVWLTGVQFGTNPPHIYINGGIHARERGSHDNVLYWISDLLYAQKYGKGLTYGSKSYTNAQVLKVLGAGIVAVPLSNPDGTNYDQTSNSCWRKNRNPKSGTGSSAGVDLNRNFDFAWDPSKWASSVRNEVASSSASSEVFRGTAAFSEPETVSSERQGIKYVLDTYSKVRWYIDLHSYAGDVLYSWGSDTDQSTQTYKTFLNATYNSIRGLTSDNPSTQYGEYISAADLTNAKNVGTKLGSAMSDSTGNEYTVMQSAYLYPTSGASDDYAFSRHIANPSLNKVYAYTVEFGFGNNAASCPFYPTAAQYTNSLKETNAGFMDFVLAAVDTGLEG

SEQ ID NO: 40173 - DNA, 2613 bp, Muscodor strobelii
  misc_feature: SGI EST ID NO. CUFF.97219.0
  misc_feature: Variant of the nucleotide sequence at SEQ ID NO 40171
caaggcatcaaatatgtcctcgacacatacagcaaagtacgctggtacatcgacttgcacagctacgcaggagatgtcctctacagctggggaagtgatactgatcagagcacgcaaacctacaaaacattcctcaacgcaacatataactcaattcggggattgacatcagataacccctcgactcaatacggcgagtacatatcggcagcagacttgacgaacgccaagaacgtcggtacgaagctcggtagtgccatgagcgattcgaccggcaacgagtacaccgtgatgcaaagcgcctatctatatccgacaagcggcgcctctgacgactacgctttctcccggcacattgctaatccgtcgctcaataaggtctatgcttacaccgtagaattcgggtttgggaacaatgcagcttcgtgccctttctatcctaccgctgctcaatatacaaatagcttgaaggagacgaacgcgggtttcatggatttcgttctggccgcagtcgacaccgggctagaaggctaggcagcgatatagatgggttttgacgtcctagacgacatttcatatcggtatcagacgcataaccgatgagggaacgagcagctgtgatcaagtatatcctagggccatccctatagccgcgtataaattaacatactaccttgccaggccgagaacagttcccatgatacactcggactcaacagtgattataaacgtcagctattgatttgcatcaataggctacgagactatatcatgagacgtgaagcactccgaaaagacaacgattctaatgcacacggatggtagtgaaaacctcctttccactgtactggggcgctcgatgctgaggccgacgccatgttatccctccatctaatatcaaggtgctcttgatgcccgatactgacgcttccacccggtttcccatttactttcaaagatcggcaatatgtgagcctcagtgttaaacacaacctcatccagtgggaagaagtctaccgggctaaacagaaggtagagatacttcaaggtctcagcaagccagaaactttccatgttatctctctttgccgggggtactgacgttacatcatcgagcgatgtgtagccatccttgactttcgtgtgtatttggaaagccttaaaaatacgccatccccattcgcggtagactgagttccctgtgatatgccacatgacgaagagagactccactgtttctggccgctgcaggttgtgtgcatctaaaggcttgattatgtagtctttcttccatgatgaaagcgagtcgcgagattctgtagaaagtgattggtctcctggccgtggctctaggtcgcgatcgcgcacattgaaccaagcgatctcaggagcaagaccggtacgagtgacggcgtacatgccccagcatgtcttcatcagatcttccgccagtttcatttgatcttcttttccagatgaccaagtcggcaacttccttgcctccgccaatggcttgccatgcgtagcacccaacgcgatcgcgccggggagaaaacagacgaggtggtccaacttaggagagagcttgccaccgatgccctgcggtagttcagcgacgaacttcaatccggagtgttcggttggtgttatcaaatgttttcgtatgccttggactacatcttcccacatctcgagatacacgggctcttggccacccgtctggaggtattgtttgatcaaatactctagaaacacaatcggtcgttagttctcttgagtccttcgtaagaactcgacgtaccgtaataagaatcaccgcgagaacctaagcggatttcctggcttgtgaagagtccagtttcggcattgacaaaaataggtaacaagccagccttggcgccattgctgtccaggacctcaatgaccttctctgctttgcgccagtatacctcgttgtctgtcaaatgggctaaatacttcatctcgagctgcaaggttccagcctccgccatcgaactcgctccgccgtcagtatgtgatggcaagccttcttttccgccgagatggatactggcatagggtatcccagagcctgactggtaggcgggaaggagacgctcagctaactcgatagacttttgaaggtatatttcgtcgtctggtgatgaaatgccggtcagcctgtgtcgagggtggttagcatatgccaataacgagagttgtaatgtagacagcgttcatttgaagggtagtcacaaagaaatgcgagaaagcggcatatttgcattgggccatgaggagactggatttcgagcttgagcaatgacatgctgtggatatttatcgggctctcgtcgaatgcaattgttcaccactgacctggtactcagataatgtgctgaaagaagccctcctagcatccggatcgttgtctcgaatgtattgacatcttgattttgatcccagtgcaatctctgatcaatccatcttcgcgacttatccacttcctcggtcaggttcatgatcatcatggtatcaagactgtcgacgatgatccagcccaggccattcgggctcatctgtgaccctcgtttagagaggggatggtatcta

SEQ ID NO: 40174 - DNA, 1791 bp, Muscodor strobelii
  misc_feature: SGI cDNA ID NO. 573997
  misc_feature: Encodes the peptide sequence at SEQ ID NO 40175
atgggcggcaaaaacagacgagcagcaaaagcaccgaaacgccgacagcaaccagagtctttctcacgaacaattctgaaatcaattgcggcacttggcgtgctactagctttcgctctgagctggttgatatacctgaaggatgatccgatcggtctcagtcaacatgcctcaggcttcgtgagttgggagtatcggcgggagcaagtcaagactgcatttaaagacagctggagagcatattctaaacatggctggggtaagaacatgcggcgtttcaaagacgaccacctgtcgacgatgatactaatagccttgtcaggcaatgatagataccatcccctctctaaacgagggtcacagatgagcccgaatggcctgggctggatcatcgtcgacagtcttgataccatgatgatcatgaacctgaccgaggaagtggataagtcgcgaagatggattgatcagagattgcactgggatcaaaatcaagatgtcaatacattcgagacaacgatccggatgctaggagggcttctttcagcacattatctgagtaccaggctgaccggcatttcatcaccagacgacgaaatataccttcaaaagtctatcgagttagctgagcgtctccttcccgcctaccagtcaggctctgggataccctatgccagtatccatctcggcggaaaagaaggcttgccatcacatactgacggcggagcgagttcgatggcggaggctggaaccttgcagctcgagatgaagtatttagcccatttgacagacaacgaggtatactggcgcaaagcagagaaggtcattgaggtcctggacagcaatggcgccaaggctggcttgttacctatttttgtcaatgccgaaactggactcttcacaagccaggaaatccgcttaggttctcgcggtgattcttattacgagtatttgatcaaacaatacctccagacgggtggccaagagcccgtgtatctcgagatgtgggaagatgtagtccaaggcatacgaaaacatttgataacaccaaccgaacactccggattgaagttcgtcgctgaactaccgcagggcatcggtggcaagctctctcctaagttggaccacctcgtctgttttctccccggcgcgatcgcgttgggtgctacgcatggcaagccattggcggaggcaaggaagttgccgacttggtcatctggaaaagaagatcaaatgaaactggcggaagatctgatgaagacatgctggggcatgtacgccgtcactcgtaccggtcttgctcctgagatcgcttggttcaatgtgcgcgatcgcgacctagagccacggccaggagaccaatcactttctacagaatctcgcgactcgctttcatcatggaagaaagactacataatcaagcctttagatgcacacaacctgcagcggccagaaacagtggagtctctcttcgtcatgtggcatatcacagggaactcagtctaccgcgaatggggatggcgtatttttaaggctttccaaatacacacgaaagtcaaggatggctacacatcgctcgatgatgtaacgtcagtacccccggcaaagagagataacatggaaagtttctggcttgctgagaccttgaagtatctctaccttctgtttagcccggtagacttcttcccactggatgaggttgtgtttaacactgaggctcacatattgccgatctttgaaagtaaatgggaaaccgggtggaagcgtcagtatcgggcatcaagagcaccttga

SEQ ID NO: 40175 - protein, 596 aa, Muscodor strobelii
  misc_feature: SGI Peptide ID NO. 573997
  misc_feature (73)..(577): Pfam Id: PF01532 Pfam Desc: Glycosyl hydrolase family 47
  misc_feature (108)..(577): Pfam Id: PF01532 Pfam Desc: Glycosyl hydrolase family 47
  misc_feature (33)..(589): SWISSPROT Homolog: EC 3.2.1.113 Mannosyl-oligosaccharide 1,2-alpha-mannosidase
MGGKNRRAAKAPKRRQQPESFSRTILKSIAALGVLLAFALSWLIYLKDDPIGLSQHASGFVSWEYRREQVKTAFKDSWRAYSKHGWGKNMRRFKDDHLSTMILIALSGNDRYHPLSKRGSQMSPNGLGWIIVDSLDTMMIMNLTEEVDKSRRWIDQRLHWDQNQDVNTFETTIRMLGGLLSAHYLSTRLTGISSPDDEIYLQKSIELAERLLPAYQSGSGIPYASIHLGGKEGLPSHTDGGASSMAEAGTLQLEMKYLAHLTDNEVYWRKAEKVIEVLDSNGAKAGLLPIFVNAETGLFTSQEIRLGSRGDSYYEYLIKQYLQTGGQEPVYLEMWEDVVQGIRKHLITPTEHSGLKFVAELPQGIGGKLSPKLDHLVCFLPGAIALGATHGKPLAEARKLPTWSSGKEDQMKLAEDLMKTCWGMYAVTRTGLAPEIAWFNVRDRDLEPRPGDQSLSTESRDSLSSWKKDYIIKPLDAHNLQRPETVESLFVMWHITGNSVYREWGWRIFKAFQIHTKVKDGYTSLDDVTSVPPAKRDNMESFWLAETLKYLYLLFSPVDFFPLDEVVFNTEAHILPIFESKWETGWKRQYRASRAP

SEQ ID NO: 40176 - DNA, 2487 bp, Muscodor strobelii
  misc_feature: SGI EST ID NO. CUFF.97220.1
  misc_feature: Variant of the nucleotide sequence at SEQ ID NO 40174
tccgccaattgtgattgacttacttgggggccggcgctgggaatctgagtatcggcccctgatcatccttgggactggaatctgataattgaaatttcgaaaaatcgtgcgagatggtgttacacggtgagcacggtctggcgagtgcgctgccacgttccttgtcgagtcgaatcccttgcttgagactgtacaaacaggattggtatagctgtcttcctcgatcatgatttcagaactgatgacacatgattcccttactcacattgtgtatgcggttttgtgcttgtgagatctgttataatgggcggcaaaaacagacgagcagcaaaagcaccgaaacgccgacagcaaccagagtctttctcacgaacaattctgaaatcaattgcggcacttggcgtgctactagctttcgctctgagctggttgatatacctgaaggatgatccgatcggtctcagtcaacatgcctcaggcttcgtgagttgggagtatcggcgggagcaagtcaagactgcatttaaagacagctggagagcatattctaaacatggctggggcaatgatagataccatcccctctctaaacgagggtcacagatgagcccgaatggcctgggctggatcatcgtcgacagtcttgataccatgatgatcatgaacctgaccgaggaagtggataagtcgcgaagatggattgatcagagattgcactgggatcaaaatcaagatgtcaatacattcgagacaacgatccggatgctaggagggcttctttcagcacattatctgagtaccaggctgaccggcatttcatcaccagacgacgaaatataccttcaaaagtctatcgagttagctgagcgtctccttcccgcctaccagtcaggctctgggataccctatgccagtatccatctcggcggaaaagaaggcttgccatcacatactgacggcggagcgagttcgatggcggaggctggaaccttgcagctcgagatgaagtatttagcccatttgacagacaacgaggtatactggcgcaaagcagagaaggtcattgaggtcctggacagcaatggcgccaaggctggcttgttacctatttttgtcaatgccgaaactggactcttcacaagccaggaaatccgcttaggttctcgcggtgattcttattacgagtatttgatcaaacaatacctccagacgggtggccaagagcccgtgtatctcgagatgtgggaagatgtagtccaaggcatacgaaaacatttgataacaccaaccgaacactccggattgaagttcgtcgctgaactaccgcagggcatcggtggcaagctctctcctaagttggaccacctcgtctgttttctccccggcgcgatcgcgttgggtgctacgcatggcaagccattggcggaggcaaggaagttgccgacttggtcatctggaaaagaagatcaaatgaaactggcggaagatctgatgaagacatgctggggcatgtacgccgtcactcgtaccggtcttgctcctgagatcgcttggttcaatgtgcgcgatcgcgacctagagccacggccaggagaccaatcactttctacagaatctcgcgactcgctttcatcatggaagaaagactacataatcaagcctttagatgcacacaacctgcagcggccagaaacagtggagtctctcttcgtcatgtggcatatcacagggaactcagtctaccgcgaatggggatggcgtatttttaaggctttccaaatacacacgaaagtcaaggatggctacacatcgctcgatgatgtaacgtcagtacccccggcaaagagagataacatggaaagtttctggcttgctgagaccttgaagtatctctaccttctgtttagcccggtagacttcttcccactggatgaggttgtgtttaacactgaggctcacatattgccgatctttgaaagtaaatgggaaaccgggtggaagcgtcagtatcgggcatcaagagcaccttgatattagatggagggataacatggcgtcggcctcagcatcgagcgccccagtacagtggaaaggaggttttcactaccatccgtgtgcattagaatcgttgtcttttcggagtgcttcacgtctcatgatatagtctcgtagcctattgatgcaaatcaatagctgacgtttataatcactgttgagtccgagtgtatcatgggaactgttctcggcctggcaaggtagtatgttaatttatacgcggctatagggatggccctaggatatacttgatcacagctgctcgttccctcatcggttatgcgtctgataccgatatgaaatgtcgtctaggacgtcaaaacccatctatatcgctgcctagccttctagcccggtgtcgactgcggccagaacgaaatccatgaaacccgcgttcgtctccttcaagctatttgtatattgagcagcggt

SEQ ID NO: 40177 - DNA, 1728 bp, Muscodor strobelii
  misc_feature: SGI cDNA ID NO. 573998
  misc_feature: Elevated expression when VOC is produced
  misc_feature: Encodes the peptide sequence at SEQ ID NO 40178
atgggcggcaaaaacagacgagcagcaaaagcaccgaaacgccgacagcaaccagagtctttctcacgaacaattctgaaatcaattgcggcacttggcgtgctactagctttcgctctgagctggttgatatacctgaaggatgatccgatcggtctcagtcaacatgcctcaggcttcgtgagttgggagtatcggcgggagcaagtcaagactgcatttaaagacagctggagagcatattctaaacatggctggggcaatgatagataccatcccctctctaaacgagggtcacagatgagcccgaatggcctgggctggatcatcgtcgacagtcttgataccatgatgatcatgaacctgaccgaggaagtggataagtcgcgaagatggattgatcagagattgcactgggatcaaaatcaagatgtcaatacattcgagacaacgatccggatgctaggagggcttctttcagcacattatctgagtaccaggctgaccggcatttcatcaccagacgacgaaatataccttcaaaagtctatcgagttagctgagcgtctccttcccgcctaccagtcaggctctgggataccctatgccagtatccatctcggcggaaaagaaggcttgccatcacatactgacggcggagcgagttcgatggcggaggctggaaccttgcagctcgagatgaagtatttagcccatttgacagacaacgaggtatactggcgcaaagcagagaaggtcattgaggtcctggacagcaatggcgccaaggctggcttgttacctatttttgtcaatgccgaaactggactcttcacaagccaggaaatccgcttaggttctcgcggtgattcttattacgagtatttgatcaaacaatacctccagacgggtggccaagagcccgtgtatctcgagatgtgggaagatgtagtccaaggcatacgaaaacatttgataacaccaaccgaacactccggattgaagttcgtcgctgaactaccgcagggcatcggtggcaagctctctcctaagttggaccacctcgtctgttttctccccggcgcgatcgcgttgggtgctacgcatggcaagccattggcggaggcaaggaagttgccgacttggtcatctggaaaagaagatcaaatgaaactggcggaagatctgatgaagacatgctggggcatgtacgccgtcactcgtaccggtcttgctcctgagatcgcttggttcaatgtgcgcgatcgcgacctagagccacggccaggagaccaatcactttctacagaatctcgcgactcgctttcatcatggaagaaagactacataatcaagcctttagatgcacacaacctgcagcggccagaaacagtggagtctctcttcgtcatgtggcatatcacagggaactcagtctaccgcgaatggggatggcgtatttttaaggctttccaaatacacacgaaagtcaaggatggctacacatcgctcgatgatgtaacgtcagtacccccggcaaagagagataacatggaaagtttctggcttgctgagaccttgaagtatctctaccttctgtttagcccggtagacttcttcccactggatgaggttgtgtttaacactgaggctcacatattgccgatctttgaaagtaaatgggaaaccgggtggaagcgtcagtatcgggcatcaagagcaccttga

SEQ ID NO: 40178 - protein, 575 aa, Muscodor strobelii
  misc_feature: SGI Peptide ID NO. 573998
  misc_feature (73)..(556): Pfam Id: PF01532 Pfam Desc: Glycosyl hydrolase family 47
  misc_feature (33)..(568): SWISSPROT Homolog: EC 3.2.1.113 Mannosyl-oligosaccharide 1,2-alpha-mannosidase
  misc_feature: Useful for introducing or modulating the production of volatile compounds
MGGKNRRAAKAPKRRQQPESFSRTILKSIAALGVLLAFALSWLIYLKDDPIGLSQHASGFVSWEYRREQVKTAFKDSWRAYSKHGWGNDRYHPLSKRGSQMSPNGLGWIIVDSLDTMMIMNLTEEVDKSRRWIDQRLHWDQNQDVNTFETTIRMLGGLLSAHYLSTRLTGISSPDDEIYLQKSIELAERLLPAYQSGSGIPYASIHLGGKEGLPSHTDGGASSMAEAGTLQLEMKYLAHLTDNEVYWRKAEKVIEVLDSNGAKAGLLPIFVNAETGLFTSQEIRLGSRGDSYYEYLIKQYLQTGGQEPVYLEMWEDVVQGIRKHLITPTEHSGLKFVAELPQGIGGKLSPKLDHLVCFLPGAIALGATHGKPLAEARKLPTWSSGKEDQMKLAEDLMKTCWGMYAVTRTGLAPEIAWFNVRDRDLEPRPGDQSLSTESRDSLSSWKKDYIIKPLDAHNLQRPETVESLFVMWHITGNSVYREWGWRIFKAFQIHTKVKDGYTSLDDVTSVPPAKRDNMESFWLAETLKYLYLLFSPVDFFPLDEVVFNTEAHILPIFESKWETGWKRQYRASRAP

SEQ ID NO: 40179 - DNA, 2487 bp, Muscodor strobelii; identical to SEQ ID NO: 40176
  misc_feature: SGI EST ID NO. CUFF.97220.1
  misc_feature: Variant of the nucleotide sequence at SEQ ID NO 40177

SEQ ID NO: 40180 - DNA, 420 bp, Muscodor strobelii
  misc_feature: SGI cDNA ID NO. 573999
  misc_feature: Encodes the peptide sequence at SEQ ID NO 40181
atgcgcgcctctgccctcctcgccgccgccgccgcatttgtcggctcggcttttgcaatcgacggtcaggtccttcagtggaatagcgagaccgatctcgttttcacctttactgctccagatgcttacgctggggctggagtgccgggcttcgacgtcacgtgtacctccatcttgttcgctctcgacacatatgaggataccccctattgcacaaacaacgatggctcagcctctgggcctgctcagggtggtgtcatgaccatcacttataataacgatggcaactatgtcgagttctggcactattactacactgttcagagtgagagatggcttgtgacaggccgaggcgatttcagcggcgagccaggcgtcatcaattttggtgttggcactccgatcaagaccggtcactaa

SEQ ID NO: 40181 - protein, 139 aa, Muscodor strobelii
  misc_feature: SGI Peptide ID NO. 573999
MRASALLAAAAAFVGSAFAIDGQVLQWNSETDLVFTFTAPDAYAGAGVPGFDVTCTSILFALDTYEDTPYCTNNDGSASGPAQGGVMTITYNNDGNYVEFWHYYYTVQSERWLVTGRGDFSGEPGVINFGVGTPIKTGH

SEQ ID NO: 40182 - DNA, 1557 bp, Muscodor strobelii
  misc_feature: SGI cDNA ID NO. 574000
  misc_feature: Elevated expression when VOC is produced
  misc_feature: Encodes the peptide sequence at SEQ ID NO 40183
atgacgcgtacctcatcctccgacggcgccacagatgccaagactgccgtgacccccaccgaaaccgaggcagtcacaacagcagatgctcccaacgacgagagaatactagcagacaatggcaacttgatcgatgatggacttcaacgagggcttaagaatcggcacctacaaatgatcgccttcggcggtgtcgttggcgcttcaatatggtacggcacgggctcagccgtagcctacagtgggcccgtgggagcgttaatcagcttcatagttgtcggtattgatgtgtactttgttatgcaggcactgggcgagatgtcgacgttgtttcctattcctggagcctttatcgagatggccagtcggtttgtagatccggcgttgggcttcagtctaggatggaattattggtacttgtgggtgacaaacattgctaatgattataacaacatctcacttgtcttgggctactgggatacaccaatacccagctatggctggattctgatcttctgggcgctgttccagactacgagcctgctaggtgtggttgtctacggagaaatggagttctggttctctgtcctgagtgtcgggtttctggtggcgatactggtcaacaccggagcaatcgggggcgaatatattggttttcgctactggcgtgaccccggtgtcatcgcaaatggaatcaacgggtttggaaagacattcgttctcgctgctgtctactacgctggcaccgagatgcttgcaatgacggcagccgaaagcaagaatccgaagaaagatctcccgaaagcaattcgacaaacattttggagaatcttaataatcttcctgggtctggtgttctttgctgggattctcgtaccgtataacagccctgatcttctgactggaacaagcaagagcgcgttgtcaccgtggacgattgcgctggtcaacgctggatggggaggagctggcaacttactgaatgtgatcgctcacagtggcagagcgccaaaattcttcgcgaaaacgacaaagaatggagtgccggcttttgcaatcattttttccaacactcttggtcttatctctctgctcaacgtggcgtcaagtcctggtaaggtcttcggatatctcattagtatctctggcgctgcgacatttgtggcttgggccgcaattggcgtagtacattggcgtatgagaaaagcgtggattctgcaaggatacagtgtcgaagatctgccctacaaggcgcttttctacccctatggcacgatttttgtcatcgtcctgaatgtgtttttggtgttcatatcaggatatggagtcttcattaggggctttgctccagtagatttcgttattgactacgtagttttggttgtatttgtcgtcctatatttatcgtggaaagttgtcaaagggacgaagatcgtagacttgagatcggtagacttagtcacgggacggcgggaatatcttgcactccatggagataccgaaaaggaggtcaagacaccgtggtatattactgccaaacgatggcttactggctag

SEQ ID NO: 40183 - protein, 518 aa, Muscodor strobelii
  misc_feature: SGI Peptide ID NO. 574000
  misc_feature (56)..(483): Pfam Id: PF00324 Pfam Desc: Amino acid permease
  misc_feature (56)..(329): Pfam Id: PF00324 Pfam Desc: Amino acid permease
  misc_feature (331)..(483): Pfam Id: PF00324 Pfam Desc: Amino acid permease
  misc_feature: Useful for introducing or modulating the production of volatile compounds
MTRTSSSDGATDAKTAVTPTETEAVTTADAPNDERILADNGNLIDDGLQRGLKNRHLQMIAFGGVVGASIWYGTGSAVAYSGPVGALISFIVVGIDVYFVMQALGEMSTLFPIPGAFIEMASRFVDPALGFSLGWNYWYLWVTNIANDYNNISLVLGYWDTPIPSYGWILIFWALFQTTSLLGVVVYGEMEFWFSVLSVGFLVAILVNTGAIGGEYIGFRYWRDPGVIANGINGFGKTFVLAAVYYAGTEMLAMTAAESKNPKKDLPKAIRQTFWRILIIFLGLVFFAGILVPYNSPDLLTGTSKSALSPWTIALVNAGWGGAGNLLNVIAHSGRAPKFFAKTTKNGVPAFAIIFSNTLGLISLLNVASSPGKVFGYLISISGAATFVAWAAIGVVHWRMRKAWILQGYSVEDLPYKALFYPYGTIFVIVLNVFLVFISGYGVFIRGFAPVDFVIDYVVLVVFVVLYLSWKVVKGTKIVDLRSVDLVTGRREYLALHGDTEKEVKTPWYITAKRWLTG

SEQ ID NO: 40184 - DNA, 1665 bp, Muscodor strobelii
  misc_feature: SGI EST ID NO. CUFF.97168.0
  misc_feature: Variant of the nucleotide sequence at SEQ ID NO 40182
gcggaagatccagcaacgcctaagacgaccaatagtgattgtagttttcatccagcattttataacgttccatgttaacgtgttttcaacattaggttctctgtcctgagtgtcgggtttctggtggcgatactggtcaacaccggagcaatcgggggcgaatatattggttttcgctactggcgtgaccccggtgtcatcgcaaatggaatcaacgggtttggaaagacattcgttctcgctgctgtctactacgctggcaccgagatgcttgcaatgacggcagccgaaagcaagaatccgaagaaagatctcccgaaagcaattcgacaaacattttggagaatcttaataatcttcctgggtctggtgttctttgctgggattctcgtaccgtataacagccctgatcttctgactggaacaagcaagagcgcgttgtcaccgtggacgattgcgctggtcaacgctggatggggaggagctggcaacttactgaatgtgatcggtacgtgtaccgatcgatggactcccacttttgagacagctccacactgacatacattgtatcgcaatgatcacggcacaattcagttcggtcaacagcgcaatttatgttgcgtctcgaagcttggtcgcgttagctcacagtggcagagcgccaaaattcttcgcgaaaacgacaaagaatggagtgccggcttttgcaatcattttttccaacactcttggtcttatctctctgctcaacgtggcgtcaagtcctggtaaggtcttcggatatctcattagtatctctggcgctgcgacatttgtggcttgggccgcaattggcgtagtacattggcgtatgagaaaagcgtggattctgcaaggatacagtgtcgaagatctgccctacaaggcgcttttctacccctatggcacgatttttgtcatcgtcctgaatgtgtttttggtgttcatatcaggatatggagtcttcattaggggctttgctccagtagatttcgttattgactacgtagttttggttgtatttgtcgtcctatatttatcgtggaaagttgtcaaagggacgaagatcgtagacttgagatcggtagacttagtcacgggacggcgggaatatcttgcactccatggagataccgaaaaggaggtcaagacaccgtggtatattactgccaaacgatggcttactggctagtttatctgagcgaattcgccatgctgataactatgaagaatgccggagcacatatttccagaggctagggcctacgtgcactctgtcgatgctcgacaaatacaagtgatcgcaaaacttttcgtatttaaaagtatgtgcaaattcaaagcacaattgagaagtctaaagatctcaatcaagtagcgctctgacgcgggttatctcctgcaggagggggacagaagctgccatcgactgcgacggggtggaaaatctagggcctcatgcatgtcttattgctttgtcgggtatacattttagtgaccggtcttgatcggagtgccaacaccaaaattgatgacgcctggctcgccgctgaaatcgcctcggcctgtcacaagccatctctcactctgaacagtgtagtaatagtgccagaactcgacatagttgccatcgttattataagtgat

SEQ ID NO: 40185 - DNA, 405 bp, Muscodor strobelii
  misc_feature: SGI cDNA ID NO. 574001
  misc_feature: Encodes the peptide sequence at SEQ ID NO 40186
atgcccgaactcccctcctctgtcaatccttctgactccgcctctgcccaagctggcaaacgaaagaattgtcccggaaagaacgcttttcaggcaaagaaatctaagtctgaattagctccatctgggaatccttctactggtgtgtccaacatgtccaagcaacagaccttcgctatccgtagccgttctggccctgttccccaacctggaaaattcccaatcgtcttttccactggtgtgggtgagcccggtgctactcgtaccttcgcttacaatcatgaatccttgtccaacaccacacatcttacactagcaactcactgttcgcccatcctcgaaatgacaactctggccggagctcgtcagcatttatctgctgcttccacaacttcacacctctag

SEQ ID NO: 40186 - protein, 134 aa, Muscodor strobelii
  misc_feature: SGI Peptide ID NO. 574001
MPELPSSVNPSDSASAQAGKRKNCPGKNAFQAKKSKSELAPSGNPSTGVSNMSKQQTFAIRSRSGPVPQPGKFPIVFSTGVGEPGATRTFAYNHESLSNTTHLTLATHCSPILEMTTLAGARQHLSAASTTSHL

SEQ ID NO: 40187 - DNA, 363 bp, Muscodor strobelii
  misc_feature: SGI cDNA ID NO. 574002
  misc_feature: Encodes the peptide sequence at SEQ ID NO 40188
atgcacctattgaacatcaaacccggccaagctttagacacgacagtcaagaaagcaaaggaaaatgcgctcctaatgcaaagcgcagccaatgcgtctctcgaattcttaaatcgcaacaacagtcagtctgaagctggtgatcttagcaatggtcttctggcgggcggtgaggatgtcgcgcgtcttgaagtattactccttggccgtgacctcgatgtcgatgtccgagactgcggccttaaggcggtgcagttccttgatggtttaggggtcaatgacgacctcatcagcggaatgatgcagcctctttgtcaggatacggttaggcgacctctcgacacacggagacatcctgaatag

SEQ ID NO: 40188 - protein, 120 aa, Muscodor strobelii
  misc_feature: SGI Peptide ID NO. 574002
MHLLNIKPGQALDTTVKKAKENALLMQSAANASLEFLNRNNSQSEAGDLSNGLLAGGEDVARLEVLLLGRDLDVDVRDCGLKAVQFLDGLGVNDDLISGMMQPLCQDTVRRPLDTRRHPE

SEQ ID NO: 40189 - DNA, 167 bp, Muscodor strobelii
  misc_feature: SGI EST ID NO. CUFF.97164.0
  misc_feature: Variant of the nucleotide sequence at SEQ ID NO 40187
gccaagctttagacacgacagtcaagaaagcaaaggaaaatgcgctcctaatgcaaagcgcagccaatgcgtctctcgaattcttaaatcgcaacaacagtcagtctgaagctggtgatcttagcaatggtcttctggcgggcggtgaggatgtcgcgcgtcttgaa

SEQ ID NO: 40190 - DNA, 963 bp, Muscodor strobelii
  misc_feature: SGI cDNA ID NO. 574003
  misc_feature: Reduced expression when VOC is produced
  misc_feature: Encodes the peptide sequence at SEQ ID NO 40191
atggagacgaggatattaggacaaaacgcccgtaggctacatcgaataggacggcaattgacttcagtcccaacaacaccatcaagacggatacccgaactccgaataccctgcgcagcaacaccactccgatcatcacaaaccttccgctcattcacctactcctcccgagccgcacactcaagcaacaccacctcatccgatccagcatttacgaccgtctcaccagaagaagtttcacacttcaatgcgctcgcctcatcatggtgggacccccaagggccatcccgcatcctccacctcatgaacccattgcgacacgacttcatccgatcatgtcgtagctcagtccccgacgagccctccgatgcatacccgtctgcaggtctacgatacctagacatcggctgtggcggaggaatcttcgccgagtccgctgctcgtctgtcgaccaccgcatcagtcacagccatcgatcccacaccccaagttctctccgtcgcaaaggcacacgcgaagcgcgacccggcgctggtgtcgaagctcacgtatttcaatacatcgattgagaatctccccgtaccagaacaggggtatgacgtagtatctatcttcgaagtcgtcgagcacgtgtcgaaccccgctgcgtttctcgaccgtgtgacgccttttgtacgaccaggcggctggttggtactaagtactatcgctaggacgtggacgtcttggctgacgacaaatgtcatggctgaggatatactgaggattgtgcccaggggcacgcatgattggaataagtatatcaacgaggaggagttgcgtaagcatttcatgacgggtggaagtgagtgggaggagccgaggtgtatgggtgttgtttatgtgccgggactgggatggaaagaggttaagggtagtgagaagattgggaattacttctttgctgttaggagacggggttga

SEQ ID NO: 40191 - protein, 320 aa, Muscodor strobelii
  misc_feature: SGI Peptide ID NO. 574003
  misc_feature (133)..(233): Pfam Id: PF08241 Pfam Desc: Methyltransferase domain
  misc_feature (133)..(231): Pfam Id: PF08242 Pfam Desc: Methyltransferase domain
  misc_feature (36)..(318): SWISSPROT Homolog: EC 2.1.1.114 Hexaprenyldihydroxybenzoate methyltransferase
  misc_feature: Useful for introducing or modulating the production of volatile compounds
METRILGQNARRLHRIGRQLTSVPTTPSRRIPELRIPCAATPLRSSQTFRSFTYSSRAAHSSNTTSSDPAFTTVSPEEVSHFNALASSWWDPQGPSRILHLMNPLRHDFIRSCRSSVPDEPSDAYPSAGLRYLDIGCGGGIFAESAARLSTTASVTAIDPTPQVLSVAKAHAKRDPALVSKLTYFNTSIENLPVPEQGYDVVSIFEVVEHVSNPAAFLDRVTPFVRPGGWLVLSTIARTWTSWLTTNVMAEDILRIVPRGTHDWNKYINEEELRKHFMTGGSEWEEPRCMGVVYVPGLGWKEVKGSEKIGNYFFAVRRRG

SEQ ID NO: 40192 - DNA, 1380 bp, Muscodor strobelii
  misc_feature: SGI EST ID NO. CUFF.97207.0
  misc_feature: Variant of the nucleotide sequence at SEQ ID NO 40190
cagcgcatgttgccgatcgaaagcgaaggcaggagcaccataatcttgcttggtcgtcattgagctacaagctactctcagtcgaagtcaattccaacgtccgtcacaccttgcgccggtccaggagagtgtgtcgcgacacaaagccaaaatggagacgaggatattaggacaaaacgcccgtaggctacatcgaataggacggcaattgacttcagtcccaacaacaccatcaagacggatacccgaactccgaataccctgcgcagcaacaccactccgatcatcacaaaccttccgctcattcacctactcctcccgagccgcacactcaagcaacaccacctcatccgatccagcatttacgaccgtctcaccagaagaagtttcacacttcaatgcgctcgcctcatcatggtgggacccccaagggccatcccgcatcctccacctcatgaacccattgcgacacgacttcatccgatcatgtcgtagctcagtccccgacgagccctccgatgcatacccgtctgcaggtctacgatacctagacatcggctgtggcggaggaatcttcgccgagtccgctgctcgtctgtcgaccaccgcatcagtcacagccatcgatcccacaccccaagttctctccgtcgcaaaggcacacgcgaagcgcgacccggcgctggtgtcgaagctcacgtatttcaatacatcgattgagaatctccccgtaccagaacaggggtatgacgtagtatctatcttcgaagtcgtcgagcacgtgtcgaaccccgctgcgtttctcgaccgtgtgacgccttttgtacgaccaggcggctggttggtactaagtactatcgctaggacgtggacgtcttggctgacgacaaatgtcatggctgaggatatactgaggattgtgcccaggggcacgcatgattggaataagtatatcaacgaggaggagttgcgtaagcatttcatgacgggtggaagtgagtgggaggagccgaggtgtatgggtgttgtttatgtgccgggactgggatggaaagaggttaagggtagtgagaagattgggaattacttctttgctgttaggagacggggttgagtgatgctgggagatggggaggtggtgagagtggtgtataattaggggtggtgatgtgtcggatatgtattatatggagctctacgtgttccgcctcgagggatagagcatgcgagctcctggcagttcagcgtgtatcgtcaaactataccctgtatcgtactagacggccccaaacacgactgtccagacatgagccacctatactccaagttcagaactaatttatgaagttaaacttgttctcggcaactcatgtcattcgc

SEQ ID NO: 40193 - DNA, 699 bp, Muscodor strobelii
  misc_feature: SGI cDNA ID NO. 574004
  misc_feature: Reduced expression when VOC is produced
  misc_feature: Encodes the peptide sequence at SEQ ID NO 40194
atgccgtcgactacaatcgatacgaacaaatttgacaacatacccgacacaatcgccgcattccgcaatggcgaatttatagtagtaatggacgatcctagtcgcgaaaacgaaggcgacctcatcatagccgccgaagacgtcacaaccgagcaaatggcctttatgatccgtcactcttccggctatgtctgcgcgcccataactccgtcaagaacagaaagtctcgagctaccacagatggttgcgaataacgaagacgcaaaaatgaccgcctacacaatcaccatagattccgcagacccttcagtaacaaccggtatcagcgcacgggaccgagcattggctatacggactctcgccaacccaaacgcgactgcggtcagcttcagacgtcccggccatgtactacctctcaaagctaggagtggcggcgtgagggtcaggagaggtcataccgaggcagcagtcgatttctgtcgtcttgcgggcaaatttgaagctgctgctatttgcgaaattgtcgatgacggcgaggaggtcgttggacaggctatacggagggatcctgggatgctgaggggtgaaggatgcattgcgtttgcgagaaaatggggactgaaggtttgcaccatcgaggatttggtgatataccttgagaagactgaggggaaggttggcgctaatgggacgtcgtga

SEQ ID NO: 40194 - protein, 232 aa, Muscodor strobelii
  misc_feature: SGI Peptide ID NO. 574004
  misc_feature (14)..(221): Pfam Id: PF00926 Pfam Desc: 3,4-dihydroxy-2-butanone 4-phosphate synthase
  misc_feature (1)..(231): SWISSPROT Homolog: EC 4.1.99.12 3,4-dihydroxy-2-butanone-4-phosphate synthase
  misc_feature: Useful for introducing or modulating the production of volatile compounds
MPSTTIDTNKFDNIPDTIAAFRNGEFIVVMDDPSRENEGDLIIAAEDVTTEQMAFMIRHSSGYVCAPITPSRTESLELPQMVANNEDAKMTAYTITIDSADPSVTTGISARDRALAIRTLANPNATAVSFRRPGHVLPLKARSGGVRVRRGHTEAAVDFCRLAGKFEAAAICEIVDDGEEVVGQAIRRDPGMLRGEGCIAFARKWGLKVCTIEDLVIYLEKTEGKVGANGTS

SEQ ID NO: 40195 - DNA, 1226 bp, Muscodor strobelii
  misc_feature: SGI EST ID NO. CUFF.97213.0
  misc_feature: Variant of the nucleotide sequence at SEQ ID NO 40193
tgactacctgttcactctaacgcccatatctgccctgagcacatatcattcaattggattcccagaagcattcttatctcttttcctgccttattgagtgatttatactcttctagcactctggtcaatcaagaccttgccgtccattccgttcatcgcttcctccttgcgactatagatataccgtgtccgcgaggacatccgacagacacatccctacacttacgcgctcctcgggcatacatccagccaccatgccgtcgactacaatcgatacgaacaaatttgacaacatacccgacacaatcgccgcattccgcaatggcgaatttatagtagtaatggacgatcctagtcgcgaaaacgaaggcgacctcatcatagccgccgaagacgtcacaaccgagcaaatggcctttatgatccgtcactcttccggctatgtctgcgcgcccataactccgtcaagaacagaaagtctcgagctaccacagatggttgcgaataacgaagacgcaaaaatgaccgcctacacaatcaccatagattccgcagacccttcagtaacaaccggtatcagcgcacgggaccgagcattggctatacggactctcgccaacccaaacgcgactgcggtcagcttcagacgtcccggccatgtactacctctcaaagctaggagtggcggcgtgagggtcaggagaggtcataccgaggcagcagtcgatttctgtcgtcttgcgggcaaatttgaagctgctgctatttgcgaaattgtcgatgacggcgaggaggtcgttggacaggctatacggagggatcctgggatgctgaggggtgaaggatgcattgcgtttgcgagaaaatggggactgaaggtttgcaccatcgaggatttggtgatataccttgagaagactgaggggaaggttggcgctaatgggacgtcgtgagctggacgatgtgtcaggacttctagggaaggcattgctgggtccttgggtctggtgggcaggtcgaaaggcgtcccagcagtaatcacttagtcttcgcctcgtcacatcgttgtcgaaagagatctactggacggggtttggggatattgaaaatgaagaaaaaggcaatctcgccactactcttggatatggtttttagactccttgtatatatggcattgataccaacatataatctcacatcatcccttcgcgcgttcttcatccgca

SEQ ID NO: 40196 - DNA, 1383 bp, Muscodor strobelii
  misc_feature: SGI cDNA ID NO. 574005
  misc_feature: Encodes the peptide sequence at SEQ ID NO 40197
atgtctgcccccactcccaccaacgctcctgccgttgcggccaagtcctctgaggtcgcttcccctgcgtctaaagcctctgccaaagaggcctatctgccattcttcaaggttgtcaaagacttcttggaagccgtcaaggaacaccaggtccttgtcgtacaagccacaacaggatttggcaaatcaacgtttgggtcaaagtttcttctgaaagacgctggctttgacggaacaattatctgcacccaaccaagtcgcgtcgccactcagtccatcgctgagcatgtcgctaggagtattggttcaacgccgggcaaagaggttggcttccgcatgcgtggccaatccaagttttccgaggacatcaggctcattttcgtcaccgagggcattctcttgcctgaacttcaggagaacgagagtctcgcaggcatcagccgcgccatcattgacgaagcacatctcagaactttgaacactgacaccatactcctgtatctccatgccgctctcaaagatcgcaaggatttgaagctcatcatcatgtcggccacgatcagggctggcttatttcaaagctatttcccgggtgctgcattgttcaacgtgaagggtcgaactttccctgtccagatcaaatacgtgcacaatcgcgtagattctattgtcgattcagtagcagtaacatgcaggcacatccacgagacacagctgcctcaagatacagcattggaagcaagctcggaaggtagtgtaggaaccagcgtagatgagattattggtgtacgacatgctccgggagcggatatgaagcgggagcagatctcagcggcggccgagcccatgacgaagacgaagaacacgaagattgatagttgtctttcatacacccccctaccacgcaaggagcacatctcggctaattattacgctgttttcatggagtgcgaattcttcttgaatcgtgaggagagagagggtcaagtcgggctaaagaagggttcgtacatgctcacatttatgttgctgctcaacccgtataacaagaagtggttttggccatggtaccaaccaactggcgggaaaggcaacccaaagcccagcctcaccgagagcagaatcaatctgcaaccgggcacacaggtcacagtcaccgatgaagtcgtggaacagctgcaccccggcctcgtcttgaaaatcgggtacggacccggtacatccgtcgccaatgcaccgatcattgtagtgctctccatgtcgacgctccaccgctgggcccgaaggcggcattcaacagggcatgttcagtgtccccgccacaccgactcgcgagggttcttcactgcagagactccggcaggcaatcgtggagaaaattaa

SEQ ID NO: 40197 - protein, 460 aa, Muscodor strobelii
  misc_feature: SGI Peptide ID NO. 574005
MSAPTPTNAPAVAAKSSEVASPASKASAKEAYLPFFKVVKDFLEAVKEHQVLVVQATTGFGKSTFGSKFLLKDAGFDGTIICTQPSRVATQSIAEHVARSIGSTPGKEVGFRMRGQSKFSEDIRLIFVTEGILLPELQENESLAGISRAIIDEAHLRTLNTDTILLYLHAALKDRKDLKLIIMSATIRAGLFQSYFPGAALFNVKGRTFPVQIKYVHNRVDSIVDSVAVTCRHIHETQLPQDTALEASSEGSVGTSVDEIIGVRHAPGADMKREQISAAAEPMTKTKNTKIDSCLSYTPLPRKEHISANYYAVFMECEFFLNREEREGQVGLKKGSYMLTFMLLLNPYNKKWFWPWYQPTGGKGNPKPSLTESRINLQPGTQVTVTDEVVEQLHPGLVLKIGYGPGTSVANAPIIVVLSMSTLHRWARRRHSTGHVQCPRHTDSRGFFTAETPAGNRGEN

SEQ ID NO: 40198 - DNA, 642 bp, Muscodor strobelii
  misc_feature: SGI cDNA ID NO. 574006
  misc_feature: Encodes the peptide sequence at SEQ ID NO 40199
atgaaggaaggcggtgtctctcttgaaatcgcctgtacccaaccacgccgcatcgccgccacatcggtcgccaagagggtcgccaaaaaatgcggcgttctctgtggcaaagaggtgggcaataaggaggtccgctttgatcgcaagtatgacgaagcaaaaacggcgctcgaatatatgacggacggtcttctgcttactgagtatcagcaagacagattgctgtccagatacagctgtattctcgtcgacggagcccacatgaggacagacaataccgatctccttttgatgcttctcaaagggacatttaagcataggccagacttaagactaattatcatgtcggtcactattaatgccacacttttcaaagcatacttcggaaaggacccctttttaaagttcctggcaaagtatgagagtaatgggtcagaagaagggttagaggctttgccacttgctatgacaagtgcaacatcacacgctgtcacaatgccagatatggcgaatacttctgcccgtaccgtaagggcaatacgaagctcatccacaactcaggcagttcacaaaatggaggaacccggagatgttctaatcttcgttccaggcttgaacgagatcgcctatgtcgtaaaatag

SEQ ID NO: 40199 - protein, 213 aa, Muscodor strobelii
  misc_feature: SGI Peptide ID NO. 574006
MKEGGVSLEIACTQPRRIAATSVAKRVAKKCGVLCGKEVGNKEVRFDRKYDEAKTALEYMTDGLLLTEYQQDRLLSRYSCILVDGAHMRTDNTDLLLMLLKGTFKHRPDLRLIIMSVTINATLFKAYFGKDPFLKFLAKYESNGSEEGLEALPLAMTSATSHAVTMPDMANTSARTVRAIRSSSTTQAVHKMEEPGDVLIFVPGLNEIAYVVK

SEQ ID NO: 40200 - DNA, 402 bp, Muscodor strobelii
  misc_feature: SGI cDNA ID NO. 574007
  misc_feature: Elevated expression when VOC is produced
  misc_feature: Encodes the peptide sequence at SEQ ID NO 40201
atgatgcaggccaaacctaacgttgaaaaagccctatctcaagtcggcagcgaaagcaatgaaattcatgccagcgagaactatagtgacccgtccgatacatctggcagtctgaaggattttgttgagtctgatgatgacgaggatgatcaatcatcttctttcgtgaacagtccgtctctcggcacaaatgatgcgtcgcctcatgttttgtctcttctgaccagggctatgtcggatatccggatggtggcagacacgttgacggaagtagtgcgcatacttaatgagacgcatcttgatcatgtcccttacagcgactcggaagccggcagcattcacgaaggcgtcgcaaggggagtcacggcgaccaacatgagcgggaaggtcatttgtctttag

SEQ ID NO: 40201 - protein, 133 aa, Muscodor strobelii
  misc_feature: SGI Peptide ID NO. 574007
  misc_feature: Useful for introducing or modulating the production of volatile compounds
MMQAKPNVEKALSQVGSESNEIHASENYSDPSDTSGSLKDFVESDDDEDDQSSSFVNSPSLGTNDASPHVLSLLTRAMSDIRMVADTLTEVVRILNETHLDHVPYSDSEAGSIHEGVARGVTATNMSGKVICL

SEQ ID NO: 40202 - DNA, 558 bp, Muscodor strobelii
  misc_feature: SGI EST ID NO. CUFF.97259.0
  misc_feature: Variant of the nucleotide sequence at SEQ ID NO 40200
gtggtttactcccttttgtgtttttcaccataatcacattatgggtagcctgcgatagaccactcactcgcatgatgcaggccaaacctaacgttgaaaaagccctatctcaagtcggcagcgaaagcaatgaaattcatgccagcgagaactatagtgacccgtccgatacatctggcagtctgaaggattttgttgagtctgatgatgacgaggatgatcaatcatcttctttcgtgaacagtccgtctctcggcacaaatgatgcgtcgcctcatgttttgtctcttctgaccagggctatgtcggatatccggatggtggcagacacgttgacggaagtagtgcgcatacttaatgagacgcatcttgatcatgtcccttacagcgactcggaagccggcagcattcacgaaggcgtcgcaaggggagtcacggcgaccaacatgagcgggaaggtcatttgtctttagttgtccgtagtggtttccagggcgagcttttcgcttcagtgttctcggggtgttctgtagaaagaagtttggcaatacaaaatcg

SEQ ID NO: 40203 - DNA, 840 bp, Muscodor strobelii
  misc_feature: SGI cDNA ID NO. 574008
  misc_feature: Reduced expression when VOC is produced
  misc_feature: Encodes the peptide sequence at SEQ ID NO 40204
gagctggatgtctctcttgctgccgcaaacatagaaccctcgattcgagatcacctgaagacgaaatggctgttacatttggcacgtcaaaagaacgagcctaaaaaggccgcctctccatcgctgccatctacggtcacggcgactggcaacgccggccaagttgaagactctgacagcgatagtggagaagatctccatagtgatcccgatcatcaatcctaccaagccagttcatcgaatccaagcgcaccatcaagaaacaacatgcgcagacatcaagaggcacccctccgccctcaggtcattcttatcagcgacgacgatagtggcgacgagctctacccacctccacctgcatccgaacctgctgcccccgatacacctctcggccccacgggattaatcgatctcaccgatgagctagatgaagatcaggcagatgatgcattggttgatttagacacacaatcagagaaagagatatggtcgttcgcgtgtcttttctccgggcacgatcccgccgcaaccgatcctgcaaaccccggccaccaccatcgtttccaaggccttgccattgccctcaggccccaccagctttgggccgtcacgcggttactgttcacgtaccactttgaaaaggtgtttggtgttctcttggccgatggcatgggcgttggcaagactctggagagctcctgtggcgccattctcgcatcgtatatccgtctcgcatcagcagacgtcaagctcgacaggaagcataattctggccgccatttacctgccaaggcttcgcttgtccctgtgttgagagactccctacagcacagcttctag

SEQ ID NO: 40204 - protein, 279 aa, Muscodor strobelii
  misc_feature: SGI Peptide ID NO. 574008
  misc_feature: Useful for introducing or modulating the production of volatile compounds
ELDVSLAAANIEPSIRDHLKTKWLLHLARQKNEPKKAASPSLPSTVTATGNAGQVEDSDSDSGEDLHSDPDHQSYQASSSNPSAPSRNNMRRHQEAPLRPQVILISDDDSGDELYPPPPASEPAAPDTPLGPTGLIDLTDELDEDQADDALVDLDTQSEKEIWSFACLFSGHDPAATDPANPGHHHRFQGLAIALRPHQLWAVTRLLFTYHFEKVFGVLLADGMGVGKTLESSCGAILASYIRLASADVKLDRKHNSGRHLPAKASLVPVLRDSLQHSF

SEQ ID NO: 40205 - DNA, 1127 bp, Muscodor strobelii
  misc_feature: SGI EST ID NO. CUFF.97262.2
  misc_feature: Variant of the nucleotide sequence at SEQ ID NO 40203
tggatgtctctcttgctgccgcaaacatagaaccctcgattcgagatcacctgaagacgaaatggctgttacatttggcacgtcaaaagaacgagcctaaaaaggccgcctctccatcgctgccatctacggtcacggcgactggcaacgccggccaagttgaagactctgacagcgatagtggagaagatctccatagtgatcccgatcatcaatcctaccaagccagttcatcgaatccaagcgcaccatcaagaaacaacatgcgcagacatcaagaggcacccctccgccctcaggtcattcttatcagcgacgacgatagtggcgacgagctctacccacctccacctgcatccgaacctgctgcccccgatacacctctcggccccacgggattaatcgatctcaccgatgagctagatgaagatcaggcagatgatgcattggttgatttagacacacaatcagagaaagagatatggtcgttcgcgtgtcttttctccgggcacgatcccgccgcaaccgatcctgcaaaccccggccaccaccatcgtttccaaggccttgccattgccctcaggccccaccagctttgggccgtcacgcggttactgttcacgtaccactttgaaaaggtgtttggtgttctcttggccgatggcatgggcgttggcaagactctggagagctcctgtggcgccattctcgcatcgtatatccgtctcgcatcagcagacgtcaagctcgacaggaagcataattctggccgccatttacctgccagtacgcctcgtcatcgacaagcacctcattcccactgtccctcgggaacatacgtcagaggcttcgcttgtccctgtgttgagagactccctacagcacagcttctagcgtcgggtcatcttcccaagggtcccacagtgatcctcgtgccgccggggctccgtgagcagtggtaccagcaactatacaagtatatcccccccggggcgacccagaacagcattcgaagaccggacatctggtccatccacacgcaagctgagaagatcacttccacgatgcgacaaaaatatccccgagtcaaatttttggctgcttctgagctatgcggagaggaaatc

SEQ ID NO: 40206 - DNA, 756 bp, Muscodor strobelii
  misc_feature: SGI cDNA ID NO. 574009
  misc_feature: Encodes the peptide sequence at SEQ ID NO 40207
atggaaggacgcccctcggatcgccctcgcgagcttgacgatatctcagtatcgccggtagatgacaaggtgaacaccggctccactggagccaacagtccagctggcacagcgcaccaggaacgccccaaagttcgcttcaacagcaaagaaaatttacctacattggctgcaaaggcacgcgaagagcaacagcaaggtgtcggtacgcggaagctgcgcccggccctatcgagaaatcccaactccttcgggtctgcctctggtgatgttccggatgagaacattacaccaaaaaaggctgcatctgcagccgcagccgcagaacgcgctcgcgcgattgcagaagatgcacatagcgattacgaatcgcctccgtcgagtcgaagatggtcgataacgtctgaagcactttctgataggagttattcagaggttcctatcactggatcagaagccaaagatgaaattcagaatgatccttcgccaagcgatcaaagcgccatggccacagctcaggctgaagagttaatcaaggctcacatgcttgcacaaaaccagacaatgcaatcagcactgcgttcgatgtccgaaaagaattcatcgcaggcagagctcaatcccgatgtaactgatgactaccacatttcgtctgggaacggtagaggaggagtcttctatggcacgtacaaaacaatcccgttcctttttggtattcgttattttctagaaggatctttgctaacacgtgttgca

SEQ ID NO: 40207 - protein, 252 aa, Muscodor strobelii
  misc_feature: SGI Peptide ID NO. 574009
MEGRPSDRPRELDDISVSPVDDKVNTGSTGANSPAGTAHQERPKVRFNSKENLPTLAAKAREEQQQGVGTRKLRPALSRNPNSFGSASGDVPDENITPKKAASAAAAAERARAIAEDAHSDYESPPSSRRWSITSEALSDRSYSEVPITGSEAKDEIQNDPSPSDQSAMATAQAEELIKAHMLAQNQTMQSALRSMSEKNSSQAELNPDVTDDYHISSGNGRGGVFYGTYKTIPFLFGIRYFLEGSLLTRVA

SEQ ID NO: 40208 - DNA, 836 bp, Muscodor strobelii
  misc_feature: SGI EST ID NO. CUFF.97239.0
  misc_feature: Variant of the nucleotide sequence at SEQ ID NO 40206
cgcaacctgggcaagatgatataatgttcgattgccagatttataacaatatcgcctgcatcatttgcctacacacgaactcacgtagttcataataggccaccatagcatcgcccacttcacatacagtctcaaaattgactctcctgagattcttctattcgtgtcatggaaggacgcccctcggatcgccctcgcgagcttgacgatatctcagtatcgccggtagatgacaaggtgaacaccggctccactggagccaacagtccagctggcacagcgcaccaggaacgccccaaagttcgcttcaacagcaaagaaaatttacctacattggctgcaaaggcacgcgaagagcaacagcaaggtgtcggtacgcggaagctgcgcccggccctatcgagaaatcccaactccttcgggtctgcctctggtgatgttccggatgagaacattacaccaaaaaaggctgcatctgcagccgcagccgcagaacgcgctcgcgcgattgcagaagatgcacatagcgattacgaatcgcctccgtcgagtcgaagatggtcgataacgtctgaagcactttctgataggagttattcagaggttcctatcactggatcagaagccaaagatgaaattcagaatgatccttcgccaagcgatcaaagcgccatggccacagctcaggctgaagagttaatcaaggctcacatgcttgcacaaaaccagacaatgcaatcagcactgcgttcgatgtccgaaaagaattcatcgcaggcagagctcaatcccgatgtaactgatgactaccacatttcgtctgggaacggtagagg

SEQ ID NO: 40209 - DNA, 1857 bp, Muscodor strobelii
  misc_feature: SGI cDNA ID NO. 574011
  misc_feature: Elevated expression when VOC is produced
  misc_feature: Encodes the peptide sequence at SEQ ID NO 40210
atgcccagtcccgacagctacactattggttggatatgcgccgtccacgtagaaatcgtcgcagcgcgggccttcttagacgaagtgcacgatgaccttgatgaagtgcccgtcaatgacaccaactcctatatcctggggcggatcaagaagcataacgttgtcattgcctccctaccacacggaaagcttggcctcgtcagtgccaccagcgtcgccagaaacatggcacacacttttaccaacgtgagaatcggcttgatggtaggtattgccggaggcgtaccaagcaaaagacacgacatccgccttggcgacattgtcgtcagttctcccggcaacggcgctgggggtgtgcttcagtacgactatggaaggacggttcaggggaagcgatttgtacgtacgggacatctaaatagtccaccagatgtcattctaggcgcagtcagtgtcctcagggcccagtacgaggaggacgggaataatatcagcgagactatcgagactacgttagctactaagaagcgactgcaatctaaatacggaagaccggacccagccaccgacagattataccttgccacctacgaccatcgaggaagcacagaggcaacgtgtatggcagtgtgcgacaggaatgagactgtaccccggcctccccgatcggagcatgaagacgagaccactgttcattatggtttggtcgcttctgcgaaccagctgatgaaggacgccaacatccgcgacaaactgtccgaagaggaagacgtcctgtgtttcgagatggaagccgcggggcttatgaaccaggtcccctgtatcgtggtccgcggcatttgcgactactcagacacacacaaaaacgatgcgtggcaacgctattcggcaatggcggctgctgcatacgcgcgagatctacttgctaagatcataccaaacaaacttatggccgaaagaagattaagcgaggttctatcagctgtacaggaagacgtgacacaagtaagatctggagtggaaagcctaagagcagaagcgcatgttgatcacatcagcaaatggctatcgcctcccgatccgtcgaccaatttgaacaacgccttcaaaagccgtcatccaggatcggggaagtggttcctcaaccacgcggcctacttaggttggaaatcggaaagaaactcctttttgtggttacatggcatttctggatgtggcaagacagttctttcttctactattgttcaagacttgatgaacaacgggacatcgaagatcctctatttctatttcgacttcaacgacgagagcaagcagaactttgacatgatgctccgatctctgattagtcaactgtatgacaactgcgctaaggcccggaatcgtctagactccctttacaacttatgtaatcaagggaaacatcaacccaatcccaactcacttcgtgcggcttttcatgatatgatacaacaagacggtgaagtccatatcatgcttgatgcactcgacgaatgtccaataagaaccgaatacccaataggaggattgcttccatggattcacaatcttcacagctctggtttggacatccacctcttagtgacaagcagaccagagcacgacataatggacgctatcaggaactgggccagggaccaggatattatttccatcgagagtggcttggtacaacaagatatcaacgcatatgtctctacgagacttcgagaggatggaagacttagtaagagatggcgtacacggccagatatacaagctgagatggaagctgctctaatggagaaagcagatggaatgtacgttatttcattgtttcactatgtctattgctaa

SEQ ID NO: 40210 - protein, 618 aa, Muscodor strobelii
  misc_feature: SGI Peptide ID NO. 574011
  misc_feature: Useful for introducing or modulating the production of volatile compounds
MPSPDSYTIGWICAVHVEIVAARAFLDEVHDDLDEVPVNDTNSYILGRIKKHNVVIASLPHGKLGLVSATSVARNMAHTFTNVRIGLMVGIAGGVPSKRHDIRLGDIVVSSPGNGAGGVLQYDYGRTVQGKRFVRTGHLNSPPDVILGAVSVLRAQYEEDGNNISETIETTLATKKRLQSKYGRPDPATDRLYLATYDHRGSTEATCMAVCDRNETVPRPPRSEHEDETTVHYGLVASANQLMKDANIRDKLSEEEDVLCFEMEAAGLMNQVPCIVVRGICDYSDTHKNDAWQRYSAMAAAAYARDLLAKIIPNKLMAERRLSEVLSAVQEDVTQVRSGVESLRAEAHVDHISKWLSPPDPSTNLNNAFKSRHPGSGKWFLNHAAYLGWKSERNSFLWLHGISGCGKTVLSSTIVQDLMNNGTSKILYFYFDFNDESKQNFDMMLRSLISQLYDNCAKARNRLDSLYNLCNQGKHQPNPNSLRAAFHDMIQQDGEVHIMLDALDECPIRTEYPIGGLLPWIHNLHSSGLDIHLLVTSRPEHDIMDAIRNWARDQDIISIESGLVQQDINAYVSTRLREDGRLSKRWRTRPDIQAEMEAALMEKADGMYVISLFHYVYC

SEQ ID NO: 40211 - DNA, 4087 bp, Muscodor strobelii
  misc_feature: SGI EST ID NO. CUFF.97265.1
  misc_feature: Variant of the nucleotide sequence at SEQ ID NO 40209
gaaacatcccggtcggcccaggaacgtacgcggtggtcttaccagaacacgatcgcgatagccgacattatcgggcgcgccaccgccgcggccattatcggtgtctttatcgtgattccactagtagtattaccataccgatctagaaatacccagactgtcatatcttccattcttgtcctcgcatttgcccctctcgtgacggtcctgttcaaggtctcgaacttggagatgatggtggtgacggcggcctatgcggcagtgctcgcgacgtttgtgtcgacgaactaggacagcctagcgttctgccccgcgcggaaactagcaaggccatgcggcatgggctgacggaggtggtttagcggcgtgcatatcgcgtccgatcctgatgcaggctgaattgtgatcctagcagattataccatatatgtacgtcgtgcactttatgcatattcatcactcgaactaccaaaggcgcgcacgagacgagggaccaatgcgtcgcatccgtgtcatcttgatccacgtcgacctactacacgattaaatcttaacatcaagcacttgatacgtaaatgacccagatggtcgcgtcgtatatggtacatcatcaggccgaaacgcaccgacaaggcgcactgggtaggcatttcctggccatctaaccacgacggtacaggatgcgagctgcagcacacgtaccccatcccgttgccgttcttcttggcgtcgagcgcatatgtactccatccagtacattatcagatccgatctcccaactatagggatactgcctcaccatgtacactctatttcttcctaaagcgcagaaaaagagagagaaaatccgaagaaatggatgcaatatcctgatctgcagttatggacagatgttacctacgctgattcgaacttagcccctccaagatgtcttcgtctacctctctcgcagcctgcatttgattttgcccgccacgttgaggcgaggcaatgcgactcacgtcgcccatgatcttcccggccgccagatgcaagaaaatgcgtcgccaccgctaccaccttgcatgcagtataaacagcctcgatttgttcattggctggtctcttcggtgaaccgcccccatgtggtgtcagtgctttggtagcaggactcgaggaaacaggaagtgcactttctcggacacgaccagccaatgacagataccaaacactgctatggcagagcccattttcagctctcctacacaccgtcagagcagatgcccccctctttagaatatcatcgccatcgttgtgggctacgcctgggtgtcatgaacagcctctcatttcccagtcgagtttttcaagcgttcgaaagacggttccacttaccatccacaaaccacttgctcgcgaacctcaggccgaccgacatcgagtctcccattccacctctctgcagactacgccctgaaccgtttccacgatgcccagtcccgacagctacactattggttggatatgcgccgtccacgtagaaatcgtcgcagcgcgggccttcttagacgaagtgcacgatgaccttgatgaagtgcccgtcaatgacaccaactcctatatcctggggcggatcaagaagcataacgttgtcattgcctccctaccacacggaaagcttggcctcgtcagtgccaccagcgtcgccagaaacatggcacacacttttaccaacgtgagaatcggcttgatggtaggtattgccggaggcgtaccaagcaaaagacacgacatccgccttggcgacattgtcgtcagttctcccggcaacggcgctgggggtgtgcttcagtacgactatggaaggacggttcaggggaagcgatttgtacgtacgggacatctaaatagtccaccagatgtcattctaggcgcagtcagtgtcctcagggcccagtacgaggaggacgggaataatatcagcgagactatcgagactacgttagctactaagaagcgactgcaatctaaatacggaagaccggacccagccaccgacagattataccttgccacctacgaccatcgaggaagcacagaggcaacgtgtatggcagtgtgcgacaggaatgagactgtaccccggcctccccgatcggagcatgaagacgagaccactgttcattatggtttggtcgcttctgcgaaccagctgatgaaggacgccaacatccgcgacaaactgtccgaagaggaagacgtcctgtgtttcgagatggaagccgcggggcttatgaaccaggtcccctgtatcgtggtccgcggcatttgcgactactcagacacacacaaaaacgatgcgtggcaacgctattcggcaatggcggctgctgcatacgcgcgagatctacttgctaagatcataccaaacaaacttatggccgaaagaagattaagcgaggttctatcagctgtacaggaagacgtgacacaagtaagatctggagtggaaagcctaagagcagaagcgcatgttgatcacatcagcaaatggctatcgcctcccgatccgtcgaccaatttgaacaacgccttcaaaagccgtcatccaggatcggggaagtggttcctcaaccacgcggcctacttaggttggaaatcggaaagaaactcctttttgtggttacatggcatttctggatgtggcaagacagttctttcttctactattgttcaagacttgatgaacaacgggacatcgaagatcctctatttctatttcgacttcaacgacgagagcaagcagaactttgacatgatgctccgatctctgattagtcaactgtatgacaactgcgctaaggcccggaatcgtctagactccctttacaacttatgtaatcaagggaaacatcaacccaatcccaactcacttcgtgcggcttttcatgatatgatacaacaagacggtgaagtccatatcatgcttgatgcactcgacgaatgtccaataagaaccgaatacccaataggaggattgcttccatggattcacaatcttcacagctctggtttggacatccacctcttagtgacaagcagaccagagcacgacataatggacgctatcaggaactgggccagggaccaggatattatttccatcgagagtggcttggtacaacaagatatcaacgcatatgtctctacgagacttcgagaggatggaagacttagtaagagatggcgtacacggccagatatacaagctgagatggaagctgctctaatggagaaagcagatggaatgttccggtgggcttcgtgtcagttggatgaacttgagaagtgcattgcaccccgagatgttcgagaggcgctcgccaacctcccaaaaacactgtacgaaacatatgcgcgaatcataacccgcatactatttaatcatgggaaagttgcaatacggattcttcaatttctggccttctccgaacgccctttgactgtcgaagaagctgtcgacagcatcacaattgacgtggacgcgagaagttttgacctaaaggacaggattccagttccagaagagatatcgaaatactgttccagcctagtcgtcgtctccaaaaggcatggacgctataacgaaccaagcacagtgacagaactacaacttgcccacttctcagtaaaggagtatcttatttcagaccagctagcacctgatattgcccaagaccttaacaccttcaccgctagagcatcacttgcaaacgtatgcctagtatatctcctccagctagagcataatcatcccattaaagaagtgagacaagaattccacttagcatcatatgctgcacaatactggacaagccatactacggcagccaataacaattgtctgctacatgtcaagttagtaacagatttctttgccaataaaatggcatatgagacctgctatcgactttaccctgtagatgcagatgggcctttacatgccgatgaaattgggggggttccgcctatactttactatgcatcatttgcaggtcttaccgaggcagtttctctactgctggacagaggtgccgacgtcaatgca

SEQ ID NO: 40212 - DNA, 2391 bp, Muscodor strobelii
  misc_feature: SGI cDNA ID NO. 574012
  misc_feature: Encodes the peptide sequence at SEQ ID NO 40213
atggccattagcttaggccaagttctctatcatatctctgctctagtatcatttgcaggaattgttgcttcgaccggtgtgatatcgtgggaagcggctgtccaaaaagccaatgacctgattgctcaactcaacgtaacggaaaaggtcggcctcacaacaggaaatattgttggaagttgcgcagggaacattgatgctattccgagagtcaacttctcaggtctatgtcttcaagatggacctctcgcgatccgattagccgatttggccactcagttcccagctggcatcacggcaggggcgagttgggataaggaactcatgtacactcgcgcaaactacatggggcaggaattccatgataaaggagcccatattctgcttggcccagtagctgggccgttgggtcatcatccgctgggtggccgtaattgggagggattcggagcagacccttatttatctggagtagcaaatgagatcaccgtccgtggtatccaagacgccggtgtacaagctgttattaagcactacgttggcaacgaacaggagacccagcgttcaaacacagtcatcgatggggtagatgtggaaggcatctcatccaatatcgatgaccggacactccacgaggtatatgcctggcctttcgccaatgctgtgaaggctggtgtttcgtccgtcatgtgcagctacaaccggctgaatagtacctacgcatgcgaaaacagtcggattctcaatcagatcctgaaggatgagttgggatttcccggttatgttatgtcagactggtttgccactcactcgggtgttccctcaatcgaggcaggcttggacatgaccatgcctggaccaaccaatcagtctgcaatttacgtttcctctaacgcaagcaccattccagacccgagcacgatcccaagctattttggtagttcgctcgtcacggctgttcagaatggaactattaccgagtcacgcctagacgacatgattcgccgtatactgacaccgtatttctatcttggccaagatcagcccaattttccgacttacgacatgagcggcgtcttcttgtattatctgggttacggtctgatttcgaacaccatgggaagtccaccagcacgtgatgtccgggccaatggcacacacgcagcccttgttcgtgagctggcagccgctggtacagtcctcctcaagaatactaaaaacgctcttcctatcaagaacgtaacaaatatcggtgtgtttggcaacgatgccggtgatgttgttgatggcttgtatgtcgttgttcaggccgaaacaccacttatgccgccgacgggaacgttgcccgttggtgggggctcaggttcaggacgtgctgttgatattgtctcgccgttacaggcgatcaggactaaaggctataaagacggctttcgcgtgcaatggatcacagacaacacctatttggtacagcagaacgggatggctcaaatatttccaacacctgatgtctgtcttgtctttctgaatagttatgcgacagaaggttttgaccgcgtggactttgagcttgattataattcgaccgcagtggttgaagaagttgccaagtactgtccaaaaacgatggtgatcacacactctgatggtgtgaatacaatgccctgggccgacaacgaaaacgtcactgctattctggctgcacattacccaggagagcagagcggaaactcgatcgtggatgtattatggggtgacgtaaatccgtcaggtcatcttccatacaccattccgagagctgagtcggattatgacgtgccggttttcaacatcacagggacgcctgaagcgactgattcggcggcttggcagagcgatttcagcgaccgtctcttggttgactatcgacgatttgacgctttgaacattacaccgttgtatgagtttggattcggccttagttatactactttcagtttgtctgattccctggttattgacacgctcaacacaacggcaatctcccccttgcctctgacttcatcgaatggaacaacaacaccacctggcggcaatccagatctctggacagtcctagtcaatgtcacaactactgtcaccaatgatggcgacgtcgccggctctgctgtaccgcagctctacgtctcgctgctagacgggcccgaagggacacctatacgagctcttcgagggttcgaaaagatatatttacaaccaggcgaatcagcgctagtctcatttagcctcatgagacgagatctgagcttttggaatgttgacatgcagaactggcagctgcctaaggaggttgtactctatgttgggttcagctcaagggatcttaaggctacaaccgagttatcgctatga

SEQ ID NO: 40213 - protein, 796 aa, Muscodor strobelii
  misc_feature: SGI Peptide ID NO. 574012
  misc_feature (65)..(285): Pfam Id: PF00933 Pfam Desc: Glycosyl hydrolase family 3 N terminal domain
  misc_feature (399)..(657): Pfam Id: PF01915 Pfam Desc: Glycosyl hydrolase family 3 C terminal domain
  misc_feature (399)..(635): Pfam Id: PF01915 Pfam Desc: Glycosyl hydrolase family 3 C terminal domain
  misc_feature (24)..(673): SWISSPROT Homolog: EC 3.2.1.21 Beta-glucosidase
MAISLGQVLYHISALVSFAGIVASTGVISWEAAVQKANDLIAQLNVTEKVGLTTGNIVGSCAGNIDAIPRVNFSGLCLQDGPLAIRLADLATQFPAGITAGASWDKELMYTRANYMGQEFHDKGAHILLGPVAGPLGHHPLGGRNWEGFGADPYLSGVANEITVRGIQDAGVQAVIKHYVGNEQETQRSNTVIDGVDVEGISSNIDDRTLHEVYAWPFANAVKAGVSSVMCSYNRLNSTYACENSRILNQILKDELGFPGYVMSDWFATHSGVPSIEAGLDMTMPGPTNQSAIYVSSNASTIPDPSTIPSYFGSSLVTAVQNGTITESRLDDMIRRILTPYFYLGQDQPNFPTYDMSGVFLYYLGYGLISNTMGSPPARDVRANGTHAALVRELAAAGTVLLKNTKNALPIKNVTNIGVFGNDAGDVVDGLYVVVQAETPLMPPTGTLPVGGGSGSGRAVDIVSPLQAIRTKGYKDGFRVQWITDNTYLVQQNGMAQIFPTPDVCLVFLNSYATEGFDRVDFELDYNSTAVVEEVAKYCPKTMVITHSDGVNTMPWADNENVTAILAAHYPGEQSGNSIVDVLWGDVNPSGHLPYTIPRAESDYDVPVFNITGTPEATDSAAWQSDFSDRLLVDYRRFDALNITPLYEFGFGLSYTTFSLSDSLVIDTLNTTAISPLPLTSSNGTTTPPGGNPDLWTVLVNVTTTVTNDGDVAGSAVPQLYVSLLDGPEGTPIRALRGFEKIYLQPGESALVSFSLMRRDLSFWNVDMQNWQLPKEVVLYVGFSSRDLKATTELSL

SEQ ID NO: 40214 - DNA, 3057 bp, Muscodor strobelii
  misc_feature: SGI cDNA ID NO. 574013
  misc_feature: Encodes the peptide sequence at SEQ ID NO 40215
atgaagctccaagctcaaatcgggctggtgtggctatgtactaggtcgctgctttatgctgtcgcagctacagacgatttcctaaatccacctgcaattgttcgtcctcgttttcgatactggcttcctgacccaagtgtacccatagacactgtgaaagatgacatcgcatcttctgcgcagattggcgctggcggcattgagttcctcccgttctatcagtatggtggtgaaataggacccatgcctgccggagcagattgggctcagtcaaatttcggaactccagagttcttgtcgatgtttcaagctgcattagaagctcacaaggaggctggcctaaagatggacttcgccatggggccgaaccaaggccaaggtgtccccgccagcccgaacgatgaaggactggactgggaccttgccccctttacaagtacagtaccattgaatggatcttacaatggcattattccaggctggggtgcgggggaactagtcgcccttgtttctgcgaaggttgtagctagcacgacaatctcctcccaggcccctaatcctaccaatccagcagacaccgtcgacgcctcatacgatcagtacatcctgcaaaacggaacattagaggatcagagcagtctcgtcagtgattccaatggctatatttcggttcaatttcctgcttcctcgaatgctaccagcggaatgggttatagactatttgcattctatcagagtttgtctggcgaaaagaatcttgttttcaacagtaccgatgatcagagcatattcgataatggttcttatactgtggatcattattctgcacggggagctgatgttattacgcgtttctgggagacttacatccttaatgacacgatattggagttgctcgcagacgctggcaactacggatgggaggacagtgtggagatcagatcgaacatctcatggtctcgagatctcccagacaggttcgagcgcctcatgggctacagtatcaaacccatactacccttgcttgcattcggccagaataacgtcaatctccaatctaccgatcctggctccttccagtgcctgctcgacacgccagatcaaggagctggatatgtaaacgacttccatactgtattggaagacggttacggggagtacttacaagccctcaccaattggacaaacaaggtgcttggcctcaagttttcagcgcagccgtcttacaacttgccgatggatatgatggcaacaatcccactagtcgatgcgcctgaatgcgaaagcctgggattttccgacaacatcgacgtatatcggcagttcacgggtccagcccaactcaccgatcgaaatgtcatatcgaatgagctaggggcagtgccaggcgtcgagttcaactacgcagttccaagacttctcatatcagcgaaccgcgggttcgccggaggtatcaatcaatacgtgatccatggccaagcatacagtgggagctactatgagacgacctggcctggatatgtgccctggcagtatatattttctgagtcctggaataagaagcagcccgtgtgggatcatggatttgccggcgctattgcctacatggggagaacacagcaggtgttgcaagaaggcgttcccaggatcgacctcgctgtttactggaagcagtcagttactaatatttcgacggcatacaatctgacagagcttgttgatgcaggctggtcttattcatatatctcacccgacaactttgatctcccacaagccgtcgtcgtagatggggttctggcacccagcgggccagcctggaaggctatacttatctacagctcacagaacctatcggtggcagcagtggacacactcgctaagtacgcaagtgatggattacctatattatttatcgacggaagcccgtcgttttatcctcatggtaatggaagcaccgaggaagaatttcgatccaaattgcaatcgctgatgacgcagagcaacgtgtattctgcagtctcaggagaactcgatcttgccttgaagcaaatcgacgttcatccccaagtcacgaagtccaatatcaatggcacggtatacactgtctggagagaattgggcgcaaatggaactggatctctattcctttactcagatggagccactacaagcggaaaaatcatcgtacagtcatcaaaagctccatattggttcaattcatggacaggcgagcgcataccagtacccgtctaccaacaaaatgcaaacgaaacaacaataccgatatccctcgctgtcaaccaatcagccatcattgtcttctccgacgatctatcgtcagaaatcaaagcaccatcctaccacattacttccaacccatctaagaccatcgacatcgcatacgacaagacagccaatggattcgtagccaaggtcaaatcctcacaagaaaccggagagatcctcgcatcgaccaacaaatccatctcactgtccggagaaggtgttccggaagcattcgtactcggaaactggaccttagtagccgagcactgggatgcgccggccaacctatcagatcagaccataatcgcagaaaagaggaacacgactcatcaactaccaaagctaacctcgtggctaaatatcccagaacttgtcaatacatccggcgttggatactacacgaccacatttacatggccgccctcaagcaatctaaatgcatcggaactaggggcgtacatcacaatccccaaccttctaaataccgcccgcttgtacatcaacggcgcgaaagcacctcctttggacctcttcaatgccgtagttgacatttcaccgtacctcatcgaaggaaataacgaggtcatgatcgaggcgcctacggtgatgtggaaccagttgaagaccatcctcggcgaaatacttaatgcaggtcagaaacctgatatttttggatacgacccggatataggtaacaagccgggaacggatgttgggctggtgtcggatgtttttatcactccgtataagagtgtgcagattcagtcttga

SEQ ID NO: 40215 - protein, 1018 aa, Muscodor strobelii
  misc_feature: SGI Peptide ID NO. 574013
MKLQAQIGLVWLCTRSLLYAVAATDDFLNPPAIVRPRFRYWLPDPSVPIDTVKDDIASSAQIGAGGIEFLPFYQYGGEIGPMPAGADWAQSNFGTPEFLSMFQAALEAHKEAGLKMDFAMGPNQGQGVPASPNDEGLDWDLAPFTSTVPLNGSYNGIIPGWGAGELVALVSAKVVASTTISSQAPNPTNPADTVDASYDQYILQNGTLEDQSSLVSDSNGYISVQFPASSNATSGMGYRLFAFYQSLSGEKNLVFNSTDDQSIFDNGSYTVDHYSARGADVITRFWETYILNDTILELLADAGNYGWEDSVEIRSNISWSRDLPDRFERLMGYSIKPILPLLAFGQNNVNLQSTDPGSFQCLLDTPDQGAGYVNDFHTVLEDGYGEYLQALTNWTNKVLGLKFSAQPSYNLPMDMMATIPLVDAPECESLGFSDNIDVYRQFTGPAQLTDRNVISNELGAVPGVEFNYAVPRLLISANRGFAGGINQYVIHGQAYSGSYYETTWPGYVPWQYIFSESWNKKQPVWDHGFAGAIAYMGRTQQVLQEGVPRIDLAVYWKQSVTNISTAYNLTELVDAGWSYSYISPDNFDLPQAVVVDGVLAPSGPAWKAILIYSSQNLSVAAVDTLAKYASDGLPILFIDGSPSFYPHGNGSTEEEFRSKLQSLMTQSNVYSAVSGELDLALKQIDVHPQVTKSNINGTVYTVWRELGANGTGSLFLYSDGATTSGKIIVQSSKAPYWFNSWTGERIPVPVYQQNANETTIPISLAVNQSAIIVFSDDLSSEIKAPSYHITSNPSKTIDIAYDKTANGFVAKVKSSQETGEILASTNKSISLSGEGVPEAFVLGNWTLVAEHWDAPANLSDQTIIAEKRNTTHQLPKLTSWLNIPELVNTSGVGYYTTTFTWPPSSNLNASELGAYITIPNLLNTARLYINGAKAPPLDLFNAVVDISPYLIEGNNEVMIEAPTVMWNQLKTILGEILNAGQKPDIFGYDPDIGNKPGTDVGLVSDVFITPYKSVQIQS

SEQ ID NO: 40216 - DNA, 175 bp, Muscodor strobelii
  misc_feature: SGI EST ID NO. CUFF.97268.0
  misc_feature: Variant of the nucleotide sequence at SEQ ID NO 40214
atttgccggcgctattgcctacatggggagaacacagcaggtgttgcaagaaggcgttcccaggatcgacctcgctgtttactggaagcagtcagttactaatatttcgacggcatacaatctgacagagcttgttgatgcaggctggtcttattcatatatctcacccgacaac

SEQ ID NO: 40217 - DNA, 1107 bp, Muscodor strobelii
  misc_feature: SGI cDNA ID NO. 574014
  misc_feature: Elevated expression when VOC is produced
  misc_feature: Encodes the peptide sequence at SEQ ID NO 40218
atggatgcccaacagaaggaggcaaacaagttcatcacggaggtctggggcctccaaggaacggcttacttgatcatcttcatgcgatactatgccaaaatcaccttgtctggctttcgtggcctagcttgggatgacgctttcatgtttttagcaacgctgacatataccgccgagtctgtcgccgcatatctcgtcgtggcgtactggcagggtttcgccaacaatgacatgacggatgagcagcgggccactctcagcccgaactcgcgagaatacttcctccgtcagagcggcagcaagacgcacgtctgcggtctgttgctctacacgactcttctatggctcttgaagtcctgctggctggtctactatacccgtctgacagatggcttagaccaaccccgccgaaagattatacgggggacctgcatcattgcggtgacgtatatatcctgtctcctcgtcgccatcttcaagtgcgtcccctttcagaaacagtggcagatcagtccgtatcctggcaataactgtacacctgctgtctcgattctccaaacggtcttcgtcctcgtgatgaacgcggtcaccgacatctatctcatgtggatccctcttccggtcatctggggatctcaattgccccggagaaaaaaggccactcttctcgtcccctttagtggtgggcttctagagctggcgttcagtattgtccgtgcggtgtccatcctcaccctcggaagcacagatcccgcacagtccggattttggtccgttagagaatctttcgtctcgaccgtcctcaccaacctgcccgtcgtatacccgctgctcgcccagatcattgaaaaatccggaggaaaaatattgaaaatcaaaccgactaacaaccccgtcagctcacggggatacagtcttagtcgtctgagggacacggatagaagcagcgtaaccagaaaacaacagtttagcatgctcacgacacagtcggctcattctgaggaacatatcgtaccgcacaagaagagccataacattagtgatgaggagaccgccaacttccccaagcgcccacagaccattgctagacacacagtttgcacatag

SEQ ID NO: 40218 - protein, 368 aa, Muscodor strobelii
  misc_feature: SGI Peptide ID NO. 574014
  misc_feature: Useful for introducing or modulating the production of volatile compounds
MDAQQKEANKFITEVWGLQGTAYLIIFMRYYAKITLSGFRGLAWDDAFMFLATLTYTAESVAAYLVVAYWQGFANNDMTDEQRATLSPNSREYFLRQSGSKTHVCGLLLYTTLLWLLKSCWLVYYTRLTDGLDQPRRKIIRGTCIIAVTYISCLLVAIFKCVPFQKQWQISPYPGNNCTPAVSILQTVFVLVMNAVTDIYLMWIPLPVIWGSQLPRRKKATLLVPFSGGLLELAFSIVRAVSILTLGSTDPAQSGFWSVRESFVSTVLTNLPVVYPLLAQIIEKSGGKILKIKPTNNPVSSRGYSLSRLRDTDRSSVTRKQQFSMLTTQSAHSEEHIVPHKKSHNISDEETANFPKRPQTIARHTVCT

SEQ ID NO: 40219 - DNA, 1502 bp, Muscodor strobelii
  misc_feature: SGI EST ID NO. CUFF.97385.0
  misc_feature: Variant of the nucleotide sequence at SEQ ID NO 40217
cccactcgcgtagagaagacgactggacacgatggatgcccaacagaaggaggcaaacaagttcatcacggaggtctggggcctccaaggaacggcttacttgatcatcttcatgcgatactatgccaaaatcaccttgtctggctttcgtggcctagcttgggatgacgctttcatgtttttagcaacgctgacatataccgccgagtctgtcgccgcatatctcgtcgtggcgtactggcagggtttcgccaacaatgacatgacggatgagcagcgggccactctcagcccgaactcgcgagaatacttcctccgtcagagcggcagcaagacgcacgtctgcggtctgttgctctacacgactcttctatggctcttgaagtcctgctggctggtctactatacccgtctgacagatggcttagaccaaccccgccgaaagattatacgggggacctgcatcattgcggtgacgtatatatcctgtctcctcgtcgccatcttcaagtgcgtcccctttcagaaacagtggcagatcagtccgtatcctggcaataactgtacacctgctgtctcgattctccaaacggtcttcgtcctcgtgatgaacgcggtcaccgacatctatctcatgtggatccctcttccggtcatctggggatctcaattgccccggagaaaaaaggccactcttctcgtcccctttagtggtgggcttctagagctggcgttcagtattgtccgtgcggtgtccatcctcaccctcggaagcacagatcccgcacagtccggattttggtccgttagagaatctttcgtctcgaccgtcctcaccaacctgcccgtcgtatacccgctgctcgcccagatcattgaaaaatccggaggaaaaatattgaaaatcaaaccgactaacaaccccgtcagctcacggggatacagtcttagtcgtctgagggacacggatagaagcagcgtaaccagaaaacaacagtttagcatgctcacgacacagtcggctcattctgaggaacatatcgtaccgcacaagaagagccataacattagtgatgaggagaccgccaacttccccaagcgcccacagaccattgctagacacacagtttgcacatagggcctagtttctactgggccgcgggatcgtgaaggaattacgcattggtaatcagatcgtcgtcgtgcgtccgtacaacttcacaaacacaagtggagatggcgaatctgcttgctcattatgagcagaaagccggcgattgttgtctggtgggcaagcttgaatcattgccctaacacgacgtgtattttccttgaattttcattgtcttctgaaatattctattttgatattctatataactaaatactgggtaactgttggaggttaggtggtgctagttcgggccttccgtatgtttggcagcaatagcagagtctagtttgtagaaaacaacagcaatcaaggtctgcttcacactgct

SEQ ID NO: 40220 - DNA, 837 bp, Muscodor strobelii
  misc_feature: SGI cDNA ID NO. 574015
  misc_feature: Encodes the peptide sequence at SEQ ID NO 40221
atggatccactgccgtcccttctaggaataccccgcgagctgcgactcgaaatctatagaaacattatgctcctagatttaaaatacgaaatcatccaagactacaaatatttgcattctcgcggtagttacgggaacctgcagcgttaccgcgactcgaaacttgtcgtaccatgggtcaatctcatgcagacctgcaggcgaatcaacacggagctcaacgactacatgaactcaacttccatctccagcagtacaggctacagaacatgtgttctcgacatacatggccagcttcgcggtcgtctttcgaaagcagtatggcgacacattccatgccctcccgctagcatcaagaatattgaggtgcaccttgggttcaagcagaaatataacgagagactcatcaatcgaccagctaggttctggggggatggaggacctatgccgattgtcagtgagctctatcagactatgaacctgctgcttcacaatggaccagttctgaatagaactaagccgctatcgaaacaccttcaatttgagaccctaatcgtcaacattcgacgtccggaaattgaagagacttttcccaaggccaaccaggccacctttcatttatctggctttatgcgatcgatgcaaaatactggcttactttatacatatattgaccggttcagcttggttgcaggcgacgatcgaaaagattttcagatacgggctattgaaaaccctggagtgcctgctcgctgggctgggtatggctttgaatggggcctccccggccattcgacaaacgagagcgaagtcgtaagccgtgttgagctggactag

SEQ ID NO: 40221 - protein, 278 aa, Muscodor strobelii
  misc_feature: SGI Peptide ID NO. 574015
MDPLPSLLGIPRELRLEIYRNIMLLDLKYEIIQDYKYLHSRGSYGNLQRYRDSKLVVPWVNLMQTCRRINTELNDYMNSTSISSSTGYRTCVLDIHGQLRGRLSKAVWRHIPCPPASIKNIEVHLGFKQKYNERLINRPARFWGDGGPMPIVSELYQTMNLLLHNGPVLNRTKPLSKHLQFETLIVNIRRPEIEETFPKANQATFHLSGFMRSMQNTGLLYTYIDRFSLVAGDDRKDFQIRAIENPGVPARWAGYGFEWGLPGHSTNESEVVSRVELD

SEQ ID NO: 40222 - DNA, 837 bp, Muscodor strobelii
  misc_feature: SGI cDNA ID NO. 574016
  misc_feature: Encodes the peptide sequence at SEQ ID NO 40223
atgttctgcccagtatttttgattttgcttcttggggtaacggcacaatcggatgacgaagattttcctccgccaggagagccggcggccttctggtctgatggctcattttccgagccgaatggagtgaactatttctaccaggagggaacagtgatgaacattagttgggacacaagctacgaagcatccaatttgtatctcgtcacgggctacgtctgggataagcctgccgggttgacaactaatcaagcacagccatggtatcagtggacagtgaaaacgagctcgttgaatacttcagaaatctacttatttcgaatcgtgaattcaaaaggcaccgaggacgatcagttgaatgggggtttcgtgagcgctgcattttatatagagcaagatgaagaggcgtcatcatcaagctcgatagccatctcgccttcttcatccttagcagtgtctgcaactgctcctttatctgaaccagtggcatcgactagtaacgcgcagccgagtgcgaccgacgccgccgcagaagcttcgtccacgccccgtacgacccaaacgatatccaacggcgcgaaagtgggcattggcgttggagttggagtaggagttctcggacttatcggattagccgccgggttcttcctatggcggaagtctaagagccagatagctagtgcgcctgattgtcatgaagaacaacagaagtggacgtactaccaatcaccaggatactcgaagattcccaatcccaacatccacgctttatatcacggtcccccgagtgaactgagtacagagcggggttctgatagaccggcggagctttcttga

SEQ ID NO: 40223 - protein, 278 aa, Muscodor strobelii
  misc_feature: SGI Peptide ID NO. 574016
MFCPVFLILLLGVTAQSDDEDFPPPGEPAAFWSDGSFSEPNGVNYFYQEGTVMNISWDTSYEASNLYLVTGYVWDKPAGLTTNQAQPWYQWTVKTSSLNTSEIYLFRIVNSKGTEDDQLNGGFVSAAFYIEQDEEASSSSSIAISPSSSLAVSATAPLSEPVASTSNAQPSATDAAAEASSTPRTTQTISNGAKVGIGVGVGVGVLGLIGLAAGFFLWRKSKSQIASAPDCHEEQQKWTYYQSPGYSKIPNPNIHALYHGPPSELSTERGSDRPAELS

SEQ ID NO: 40224 - DNA, 2044 bp, Muscodor strobelii
  misc_feature: SGI EST ID NO. CUFF.97302.0
  misc_feature: Variant of the nucleotide sequence at SEQ ID NO 40222
gattttcctccgccaggagagccggcggccttctggtctgatggctcattttccgagccgaatggagtgaactatttctaccaggagggaacagtgatgaacattagttgggacacaagctacgaagcatccaatttgtatctcgtcacgggctacgtctgggataagcctgccgggttgacaactaatcaagcacagccatggtatcagtggacagtgaaaacgagctcgttgaatacttcagaaatctacttatttcgaatcgtgaattcaaaaggcaccgaggacgatcagttgaatgggggtttcgtgagcgctgcattttatatagagcaagatgaagaggcgtcatcatcaagctcgatagccatctcgccttcttcatccttagcagtgtctgcaactgctcctttatctgaaccagtggcatcgactagtaacgcgcagccgagtgcgaccgacgccgccgcagaagcttcgtccacgccccgtacgacccaaacgatatccaacggcgcgaaagtgggcattggcgttggagttggagtaggagttctcggacttatcggattagccgccgggttcttcctatggcggaagtctaagagccagatagctagtgcgcctgattgtcatgaagaacaacagaagtggacgtactaccaatcaccaggatactcgaagattcccaatcccaacatccacgctttatatcacggtcccccgagtgaactgagtacagagcggggttctgatagaccggcggagctttcttgagagacgaaagaagatgttagggcgatgatcatgacaattcggcgcttcggggcgttcagcacagattgcatccactgtttggtgtaattatactaatgatattgagataccatgaccgatagataccagcgattgtgttggtttgcgatttgtaaagacccgcttagcgaaaactgtcgtgtggatccatatccgtcatgtcaacacaacgagctataatctccacctccacttagtgctttgccatatacgacacgccttcaaaatcgtgcgtcccaaatagaggaaatgcgttgagggggatatgctctgccaggacgctctagtccagctcaacacggcttacgacttcgctctcgtttgtcgaatggccggggaggccccattcaaagccatacccagcccagcgagcaggcactccagggttttcaatagcccgtatctgaaaatcttttcgatcgtcgcctgcaaccaagctgaaccggtcaatatatgtataaagtaagccagtattttgcatcgatcgcataaagccagataaatgaaaggtggcctggttggccttgggaaaagtctcttcaatttccggacgtcgaatgttgacgattagggtctcaaattgaaggtgtttcgatagcggcttagttctattcagaactggtccattgtgaagcagcaggttcatagtctgatagagctcactgacaatcggcataggtcctccatccccccagaacctagctggtcgattgatgagtctctcgttatatttctgcttgaacccaaggtgcacctcaatattcttgatgctagcgggagggcatggaatgtgtcgccatactgctttcgaaagacgaccgcgaagctggccatgtatgtcgagaacacatgttctgtagcctgtactgctggagatggaagttgagttcatgtagtcgttgagctccgtgttgattcgcctgcaggtctgcatgagattgacccatggtacgacaagtttcgagtcgcggtaacgctgcaggttcccgtaactaccgcgagaatgcaaatatttgtagtcttggatgatttcgtattttaaatctaggagcataatgtttctatagatttcgagtcgcagctcgcggggtattcctagaagggacggcagtggatccatgatggatgaagatggtcgctgaagatgacgagatagtgtcagcagtggaagtatctctgcgagtcaaatctcacaatgcgatatgcaggacacccaaggatgagcgcg

SEQ ID NO: 40225 - DNA, 1218 bp, Muscodor strobelii
  misc_feature: SGI cDNA ID NO. 574017
  misc_feature: Encodes the peptide sequence at SEQ ID NO 40226
atgacgaactatccaggcgaatggatggctacagattcgaccctaccagaggccgtaccctcctacagtaccttggaggcgataccacgacctccgggtccgaacggcgagatccaaattgaacccaagtgtgaccaaactgaacccgaacatgagactcccgaagccaccaaacgcggaggcacacaaaagcgatatctacgtggagtgtcgcgaaagacaggccacattattatagttgttacgcttctcatcgtagttgctgcacttgcgggcggcctcgccggaggactaacgcaacatcataaaaaccctaaaataccaacaacggacaatagcaccacgtcaggcaataatacagcacccgaatcgggccctcttctgcagtcacagctcgctgctatcaactggactgacgatgcgggagaagtctggcgtgccgttttctaccaagaagctggagatctcttcgccagtctttcgcaagacattgatgataatacgacgtggacgaaagtaaacatcagcgcgcagttcgatggtaagccagactgggctaaggctcgatccagatcacctcttgcagcatcagctacaccctggatgggcttagaaggattttcttccggcgcggcactattctatctcgacgaaaacaacctcgtccgacaggtgataaccggagactacgaccttcaaacgtgggagttgggaccggagtggaattcggcctcgacacacgcagccggcgaaaatacgcagctcgccgcagtgggctactactgtccccaaggctgcttcaacaaacactgcgtcatgtaccaggacgctgatcggacagtctactcgacgtgcggtaacgactgggaacaacgaacccctgtcgatagagcatcttcagggtcgccgctcgcggcaatcccatattcggcggacgatgggaggaacattacagtcagcgagttgcgtcttttctactacagcgatacagatatcagggcgtacttctttaatcatgaagacgattggacatgggagaaagacaagaatggcacgagcgcacaagacttcaccgctctaaatgcgtcagccatagcgctggatcatgaccatcgattgtatggtatcactgcaggtggattcgagattgtgcagttcgtatggtcgtccgactcccccgtcgaattcaaatggatgtcggacgtggtgtccagctga

SEQ ID NO: 40226 - protein, 405 aa, Muscodor strobelii
  misc_feature: SGI Peptide ID NO. 574017
MTNYPGEWMATDSTLPEAVPSYSTLEAIPRPPGPNGEIQIEPKCDQTEPEHETPEATKRGGTQKRYLRGVSRKTGHIIIVVTLLIVVAALAGGLAGGLTQHHKNPKIPTTDNSTTSGNNTAPESGPLLQSQLAAINWTDDAGEVWRAVFYQEAGDLFASLSQDIDDNTTWTKVNISAQFDGKPDWAKARSRSPLAASATPWMGLEGFSSGAALFYLDENNLVRQVITGDYDLQTWELGPEWNSASTHAAGENTQLAAVGYYCPQGCFNKHCVMYQDADRTVYSTCGNDWEQRTPVDRASSGSPLAAIPYSADDGRNITVSELRLFYYSDTDIRAYFFNHEDDWTWEKDKNGTSAQDFTALNASAIALDHDHRLYGITAGGFEIVQFVWSSDSPVEFKWMSDVVSS

SEQ ID NO: 40227 - DNA, 1533 bp, Muscodor strobelii
  misc_feature: SGI cDNA ID NO. 574018
  misc_feature: Encodes the peptide sequence at SEQ ID NO 40228
atggcaggatcatcacaaacatcgccaggagaaatagttgacggtgttcatcgccatgcttccactggtatcaaagtgattatctccggtggtggcgttggcggtctgctcgccgctcttgagtgttggcgtgcaggacatgaagtcgagctcctagaacagaataattgtctgtccacgcttggcgacttcttctctattggcccttctgcactttcgacattccactattatcccaagatgcttgctgagtataaagagacgtcatggaactcgcctttatggtggtgtgatccatcgggaaagaagctcatcagcgagatagtggaatggaatcgacctggcgcagaacctcacgctgccgcagagcatatacccatcgttggctttattcagacgcgccctcgaattatgcatatgatggaagaccagattaagcgcctcggtattcccatcttctatggccgcaaagtcgtgagctacgaagaagatgaacaatatggacttgcgcgcgtctccacagctagcaacgaagtgttcgtgggcgatgtcatcgtggcggctgagggtattggcactaagtctcatcaaatcgtcactggtcatccagtgcccattgttcctagcgggtacgctatcatgcgggcagctttcagccctgagtgtatcacacccggctctaaaggggctgaactgctacttaaacccggggaggttccagaagttcgcacgtacttcgggttagtatcctcaaacaatcatgaccaattgaacacagctgataatctgggtagcgagaatatgcatcttattacgctcttcacccatgataaggtcgggttcgcttttacacacaaggaagacggcacagcgaaggaatcgtggaacaacacgattgacccccagatccttgtcaggttcttggaggaacaaactaattggggagagcatgttgcggattttgtcaagcaagcaccggcaggctcgctcatcgactggaaactcacatggagagacccgcaacccgtctgggcgtccaaaggtggacgtatcgttcaactaggtgacagtgcccacgcgttcttgccatcgtcagcgaacggcgcaacacaggcaatggaggacgcgatttctctagcagaatgtctacgtcaaggtggtaagactaatgtggcttggtcgaccaaggttcatgccaagcttcgttatcaaagagtctcgatcattcagcagctcggagtcgtcagtcgttatacattgcatcatattgatatgagtttattagacaagggcaaaaatcctttcgagcaagctttctatcttggccgctggatttggcaacacaaggcagaggactatgctcgggaaaatttcactgcggccttggatcatttgcggaacggaacgcccttcaaaaataccaatttgccaaaaggtcacgtcttcgaggattggaccgtcgaagaggaaatggagaaacaagccgccggtattccgtcaacactgcgatctaacggagattggagtcgataa

SEQ ID NO: 40228 - protein, 510 aa, Muscodor strobelii
  misc_feature: SGI Peptide ID NO. 574018
  misc_feature (23)..(399): Pfam Id: PF01494 Pfam Desc: FAD binding domain
MAGSSQTSPGEIVDGVHRHASTGIKVIISGGGVGGLLAALECWRAGHEVELLEQNNCLSTLGDFFSIGPSALSTFHYYPKMLAEYKETSWNSPLWWCDPSGKKLISEIVEWNRPGAEPHAAAEHIPIVGFIQTRPRIMHMMEDQIKRLGIPIFYGRKVVSYEEDEQYGLARVSTASNEVFVGDVIVAAEGIGTKSHQIVTGHPVPIVPSGYAIMRAAFSPECITPGSKGAELLLKPGEVPEVRTYFGLVSSNNHDQLNTADNLGSENMHLITLFTHDKVGFAFTHKEDGTAKESWNNTIDPQILVRFLEEQTNWGEHVADFVKQAPAGSLIDWKLTWRDPQPVWASKGGRIVQLGDSAHAFLPSSANGATQAMEDAISLAECLRQGGKTNVAWSTKVHAKLRYQRVSIIQQLGVVSRYTLHHIDMSLLDKGKNPFEQAFYLGRWIWQHKAEDYARENFTAALDHLRNGTPFKNTNLPKGHVFEDWTVEEEMEKQAAGIPSTLRSNGDWSR

SEQ ID NO: 40229 - DNA, 1127 bp, Muscodor strobelii
  misc_feature: SGI EST ID NO. CUFF.97298.0
  misc_feature: Variant of the nucleotide sequence at SEQ ID NO 40227
ctttgatcttttctcataatttatagagaataacgggtgccatgtgaaaagcatttttgaaatagctataaagccaagtcccctcggtgtcaatggccgaaaaccagccttcatccagtttcatcaacctcttggagcgcttatttagaggatatagcctgtccagaagttaacccaaatttcgatatcgttcattctttgaacctaaaaacgacaagttcagccatggcaggatcatcacaaacatcgccaggagaaatagttgacggtgttcatcgccatgcttccactggtatcaaagtgattatctccggtggtggcgttggcggtctgctcgccgctcttgagtgttggcgtgcaggacatgaagtcgagctcctagaacagaataattgtctgtccacgcttggcgacttcttctctattggcccttctgcactttcgacattccactattatcccaagatgcttgctgagtataaagagacgtcatggaactcgcctttatggtggtgtgatccatcgggaaagaagctcatcagcgagatagtggaatggaatcgacctggcgcagaacctcacgctgccgcagagcatatacccatcgttggctttattcagacgcgccctcgaattatgcatatgatggaagaccagattaagcgcctcggtattcccatcttctatggccgcaaagtcgtgagctacgaagaagatgaacaatatggacttgcgcgcgtctccacagctagcaacgaagtgttcgtgggcgatgtcatcgtggcggctgagggtattggcactaagtctcatcaaatcgtcactggtcatccagtgcccattgttcctagcgggtacgctatcatgcgggcagctttcagccctgagtgtatcacacccggctctaaaggggctgaactgctacttaaacccggggaggttccagaagttcgcacgtacttcggcgagaatatgcatcttattacgctcttcacccatgataaggtcgggttcgcttttacacacaaggaagacggcacagcgaaggaatcgtggaacaacacgattgacccccagatccttgtcaggttcttggaggaacaaactaattggggagagcatgttgc

SEQ ID NO: 40230 - DNA, 1479 bp, Muscodor strobelii
  misc_feature: SGI cDNA ID NO. 574019
  misc_feature: Encodes the peptide sequence at SEQ ID NO 40231
atggcaggatcatcacaaacatcgccaggagaaatagttgacggtgttcatcgccatgcttccactggtatcaaagtgattatctccggtggtggcgttggcggtctgctcgccgctcttgagtgttggcgtgcaggacatgaagtcgagctcctagaacagaataattgtctgtccacgcttggcgacttcttctctattggcccttctgcactttcgacattccactattatcccaagatgcttgctgagtataaagagacgtcatggaactcgcctttatggtggtgtgatccatcgggaaagaagctcatcagcgagatagtggaatggaatcgacctggcgcagaacctcacgctgccgcagagcatatacccatcgttggctttattcagacgcgccctcgaattatgcatatgatggaagaccagattaagcgcctcggtattcccatcttctatggccgcaaagtcgtgagctacgaagaagatgaacaatatggacttgcgcgcgtctccacagctagcaacgaagtgttcgtgggcgatgtcatcgtggcggctgagggtattggcactaagtctcatcaaatcgtcactggtcatccagtgcccattgttcctagcgggtacgctatcatgcgggcagctttcagccctgagtgtatcacacccggctctaaaggggctgaactgctacttaaacccggggaggttccagaagttcgcacgtacttcggcgagaatatgcatcttattacgctcttcacccatgataaggtcgggttcgcttttacacacaaggaagacggcacagcgaaggaatcgtggaacaacacgattgacccccagatccttgtcaggttcttggaggaacaaactaattggggagagcatgttgcggattttgtcaagcaagcaccggcaggctcgctcatcgactggaaactcacatggagagacccgcaacccgtctgggcgtccaaaggtggacgtatcgttcaactaggtgacagtgcccacgcgttcttgccatcgtcagcgaacggcgcaacacaggcaatggaggacgcgatttctctagcagaatgtctacgtcaaggtggtaagactaatgtggcttggtcgaccaaggttcatgccaagcttcgttatcaaagagtctcgatcattcagcagctcggagtcgtcagtcgttatacattgcatcatattgatatgagtttattagacaagggcaaaaatcctttcgagcaagctttctatcttggccgctggatttggcaacacaaggcagaggactatgctcgggaaaatttcactgcggccttggatcatttgcggaacggaacgcccttcaaaaataccaatttgccaaaaggtcacgtcttcgaggattggaccgtcgaagaggaaatggagaaacaagccgccggtattccgtcaacactgcgatctaacggagattggagtcgataa

SEQ ID NO: 40231 - protein, 492 aa, Muscodor strobelii
  misc_feature: SGI Peptide ID NO. 574019
  misc_feature (23)..(381): Pfam Id: PF01494 Pfam Desc: FAD binding domain
  misc_feature (39)..(393): SWISSPROT Homolog: EC 1.14.13.1 Salicylate 1-monooxygenase
MAGSSQTSPGEIVDGVHRHASTGIKVIISGGGVGGLLAALECWRAGHEVELLEQNNCLSTLGDFFSIGPSALSTFHYYPKMLAEYKETSWNSPLWWCDPSGKKLISEIVEWNRPGAEPHAAAEHIPIVGFIQTRPRIMHMMEDQIKRLGIPIFYGRKVVSYEEDEQYGLARVSTASNEVFVGDVIVAAEGIGTKSHQIVTGHPVPIVPSGYAIMRAAFSPECITPGSKGAELLLKPGEVPEVRTYFGENMHLITLFTHDKVGFAFTHKEDGTAKESWNNTIDPQILVRFLEEQTNWGEHVADFVKQAPAGSLIDWKLTWRDPQPVWASKGGRIVQLGDSAHAFLPSSANGATQAMEDAISLAECLRQGGKTNVAWSTKVHAKLRYQRVSIIQQLGVVSRYTLHHIDMSLLDKGKNPFEQAFYLGRWIWQHKAEDYARENFTAALDHLRNGTPFKNTNLPKGHVFEDWTVEEEMEKQAAGIPSTLRSNGDWSR

SEQ ID NO: 40232 - DNA, 1127 bp, Muscodor strobelii; identical to SEQ ID NO: 40229
  misc_feature: SGI EST ID NO. CUFF.97298.0
  misc_feature: Variant of the nucleotide sequence at SEQ ID NO 40230

SEQ ID NO: 40233 - DNA, 1338 bp, Muscodor strobelii
  misc_feature: SGI cDNA ID NO. 574020
  misc_feature: Encodes the peptide sequence at SEQ ID NO 40234
atgttgacactcgccattgccgccctcgctggcctcgcctctggccaggctgttggcacgcagcagtcggagacacatcccaaattaacctggaagaaatgctcaagtggaggtagctgttcatcagtgagcggtgaagtcacaatcgatgcaaactggcgttggctgcattcgacgtcagggactgacaactgctacgacggcaacgagtggacatctgtctgcagtagtgcaactgactgcgccaccaagtgcgcgattgagggtgcggactactcgaagacatatggtgcctccactagcggtgatgctcttacactcaagttcgtcacgaaacatgagtacggtaccaacattggctcccgtttctatctcatgaacggtgcctcgtcatatcagacctttaccctgatgaataacgagttcaccttcgatgtggacctgtcaacagttgactgcggtctcaatgctgctctctactttgtcgccatggaagctgacggtggcatgaagagctacccgactaacaaggctggagctaagtacggtacgggttactgcgatgggcagtgtgcacgagatctgaagtttgtcggaggcaaggcaaatattgagggatggaagccctcctctaacgataagaatgctggcgtcggcccgtacggcggatgctgtgccgagatcgacgtttgggaatctaattcgcattcatttgccttcactccgcatccctgcgagaacaatgcctatcatgtttgcgaaacctctggttgcggcggtacctactccgatgacagattcgctggcgactgtgatcccaatggttgcgattacaacccctaccgtatgggtaacaaggacttctatggaaagggcaagaccttggatactggcaagaagtttaccgtcgttactcaattcaagtccaatgccttcacacaattcttcgtccaggacggcaagaagatcgaaattcccggttcgaccttcgacggcattccatcctccagcaccatcacacccgaatactgcaaggcccagttctcggtactcggagatcgcgatcgcttcaatgaagttggcggcttttccaaagtcaacgatgctgtttcacaacccatggtactcgtgatgtccatttgggatgatcactacgccaacatgctgtggctcgattctagctacccacctgagaaagccggccaaccaggtggcgaccgtggagactgtgctcagtcgtccggcgtccctgctgacgtcgagagcagtatccccaatgcccaggttatctggtctaatatccggttcggacctatcggctcgacggtatcagtctag

SEQ ID NO: 40234 - protein, 445 aa, Muscodor strobelii
  misc_feature: SGI Peptide ID NO. 574020
  misc_feature (17)..(445): Pfam Id: PF00840 Pfam Desc: Glycosyl hydrolase family 7
  misc_feature (23)..(439): SWISSPROT Homolog: EC 3.2.1.91 Cellulose 1,4-beta-cellobiosidase
MLTLAIAALAGLASGQAVGTQQSETHPKLTWKKCSSGGSCSSVSGEVTIDANWRWLHSTSGTDNCYDGNEWTSVCSSATDCATKCAIEGADYSKTYGASTSGDALTLKFVTKHEYGTNIGSRFYLMNGASSYQTFTLMNNEFTFDVDLSTVDCGLNAALYFVAMEADGGMKSYPTNKAGAKYGTGYCDGQCARDLKFVGGKANIEGWKPSSNDKNAGVGPYGGCCAEIDVWESNSHSFAFTPHPCENNAYHVCETSGCGGTYSDDRFAGDCDPNGCDYNPYRMGNKDFYGKGKTLDTGKKFTVVTQFKSNAFTQFFVQDGKKIEIPGSTFDGIPSSSTITPEYCKAQFSVLGDRDRFNEVGGFSKVNDAVSQPMVLVMSIWDDHYANMLWLDSSYPPEKAGQPGGDRGDCAQSSGVPADVESSIPNAQVIWSNIRFGPIGSTVSV

SEQ ID NO: 40235 - DNA, 319 bp, Muscodor strobelii
  misc_feature: SGI EST ID NO. CUFF.97316.0
  misc_feature: Variant of the nucleotide sequence at SEQ ID NO 40233
tgcgattacaacccctaccgtatgggtaacaaggacttctatggaaagggcaagaccttggatactggcaagaagtttaccgtcgttactcaattcaagtccaatgccttcacacaattcttcgtccaggacggcaagaagatcgaaattcccggttcgaccttcgacggcattccatcctccagcaccatcacacccgaatactgcaaggcccagttctcggtactcggagatcgcgatcgcttcaatgaagttggcggcttttccaaagtcaacgatgctgtttcacaacccatggtactcgtgatgtccatttggg

SEQ ID NO: 40236 - DNA, 2052 bp, Muscodor strobelii
  misc_feature: SGI cDNA ID NO. 574021
  misc_feature: Elevated expression when VOC is produced
  misc_feature: Encodes the peptide sequence at SEQ ID NO 40237
atggcgggcgttcaaccaggacagacatttacacccggcttagacttcagtacacagtcatacagcaatctcgccgataagatcgaagctgacgtgaagcgcgcacacgagataattgaggagaagctacccctcctcggtgatctcaaagctcttttatgcatcagcttcggcgacaagcccccgttttacatcgatgcgagatccggaagcgccaagcttcttgactcaacagatgttgaagctgatactaagttgaatatcaagcctgagtacatcgcgcaattctacgaaggcaagcttgagccgcgatatggactgtttaaagacgctttctttaatgtcgcgtctatgccctcaggacgcattccgatagctatcaagttcgcggacttactgaccccgcacccaccgacaccacccaagcatgcggatcagtttgaccggctcccgcaaccgacagaggacgtcggcatcattaaaaaggccgtgcaagaacaagccgcgggggaacgtgaggcaggcgtcgataatccagatcctgcccctaaagggcccaaccaacgcatttggactctagtgaataagggcgaagagtttttagacttactcaatcaccccatcatcgacgagtttgtcccttggttgctcggtgaacatgcagtcattacaacatacacggcgaacatcgcccgtcctggcaacatacccatgcagcttcacaccgaccaagtcgcagtccagccaccaatccgtgatcttgcatttggcatgaacatcatgttctacctagaagacatcacaactgagaacggaggtactcgcgtctacccagggtctcacctcggtcaaattgctcccccggacatcttcacagtggaagggacagtcgcagcagaggcgcccgcaggctcagcgcttatcttcgagagccgaatatggcacgcgacggggccaaatcgcgcagcttctggcgagcgaccggtcatcttactgtttttcatgcgatcattcattcgtcaacaggagaataacttcctgtccttgcgcaaggacgtctggccgaagctatcagatcgcgtaaagcgcatgctcgggttttacacgacaggcgcactgggcggtgtggatggtgaggtcagggaaggcttgttcgtcgaatggaaggagggtgttgcacaaggtgtcaacgaccatgctgctagtaaaatcgcgtattcaagtacctatctaggagagagccgctaccactccgaagccaccactccccttgctcgtcgccgcccacccctatccaccccgacgcgggccatgatggatataatttcagccaaccatctccggccactcgtgagctcggcgtcgccacgggccatcgcaacacgtcaatcagtcggggactggtcagaagagcctcgtggctggaccatgcaagagtgggatgaagcctcagaagcgagacagctccaactgatcctgatcaaccagccgaaatgctggcctatcaagtggggctgggttgtctaccgcacctcgtacaagcccgaactcgatagcgcttgggcgatgataaagcaacgtatcaacacacaaatgcgctgggaggaggcaccaccagacgtgcctgacataaacgaaaagatggacttcatcttcgtcgaggatgcagctgcgctggacgggatcacgcgtgaagcactgcgacaccgttttcaggcctgggcactaactgaggctcgggatctcgctgccattaacgagtatcgtgggcagcgctatacctactttcttgaggtggacgagaacgcgttgacgagcgtgcgacggccatccgaattaatcaagaaaccgcatctcaatctcgtgaaggcatggtcagagcccctacctgccgacgaggcgtatgacgaagacggggaccctgttgatccggaggattggatgaagatggcactggatgccgttcacccaaatagctacataaatctgttcgatgacgagttctggtacatcgtctacagtcacccggattgctgggcgtggatgtactaa

SEQ ID NO: 40237 - protein, 683 aa, Muscodor strobelii
  misc_feature: SGI Peptide ID NO. 574021
  misc_feature (145)..(329): Pfam Id: PF05721 Pfam Desc: Phytanoyl-CoA dioxygenase (PhyH)
  misc_feature (242)..(329): Pfam Id: PF05721 Pfam Desc: Phytanoyl-CoA dioxygenase (PhyH)
  misc_feature: Useful for introducing or modulating the production of volatile compounds
MAGVQPGQTFTPGLDFSTQSYSNLADKIEADVKRAHEIIEEKLPLLGDLKALLCISFGDKPPFYIDARSGSAKLLDSTDVEADTKLNIKPEYIAQFYEGKLEPRYGLFKDAFFNVASMPSGRIPIAIKFADLLTPHPPTPPKHADQFDRLPQPTEDVGIIKKAVQEQAAGEREAGVDNPDPAPKGPNQRIWTLVNKGEEFLDLLNHPIIDEFVPWLLGEHAVITTYTANIARPGNIPMQLHTDQVAVQPPIRDLAFGMNIMFYLEDITTENGGTRVYPGSHLGQIAPPDIFTVEGTVAAEAPAGSALIFESRIWHATGPNRAASGERPVILLFFMRSFIRQQENNFLSLRKDVWPKLSDRVKRMLGFYTTGALGGVDGEVREGLFVEWKEGVAQGVNDHAASKIAYSSTYLGESRYHSEATTPLARRRPPLSTPTRAMMDIISANHLRPLVSSASPRAIATRQSVGDWSEEPRGWTMQEWDEASEARQLQLILINQPKCWPIKWGWVVYRTSYKPELDSAWAMIKQRINTQMRWEEAPPDVPDINEKMDFIFVEDAAALDGITREALRHRFQAWALTEARDLAAINEYRGQRYTYFLEVDENALTSVRRPSELIKKPHLNLVKAWSEPLPADEAYDEDGDPVDPEDWMKMALDAVHPNSYINLFDDEFWYIVYSHPDCWAWMY

SEQ ID NO: 40238 - DNA, 609 bp, Muscodor strobelii
  misc_feature: SGI EST ID NO. CUFF.97325.0
  misc_feature: Variant of the nucleotide sequence at SEQ ID NO 40236
agatggcagcgtgagcatatagagcgtatcaaactcttgggcatgtgaaaagactctcatcctttcatcgatgacaccacatctttatcatcgacttatctgttagatagtcgtcgtgacaatggcgggcgttcaaccaggacagacatttacacccggcttagacttcagtacacagtcatacagcaatctcgccgataagatcgaagctgacgtgaagcgcgcacacgagataattgaggagaagctacccctcctcggtgatctcaaagctcttttatgcatcagcttcggcgacaagcccccgttttacatcgatgcgagatccggaagcgccaagcttcttgactcaacagatgttgaagctgatactaagttgaatatcaagcctgagtacatcgcgcaattctacgaaggcaagcttgagccgcgatatggactgtttaaagacgctttctttaatgtcgcgtctatgccctcaggacgcattccgatagctatcaagttcgcggacttactgaccccgcacccaccgacaccacccaagcatgcggatcagtttgaccggctcccgcaaccgacagaggacgtaagtgatttgacctgtca

SEQ ID NO: 40239 - DNA, 1146 bp, Muscodor strobelii
  misc_feature: SGI cDNA ID NO. 574022
  misc_feature: Encodes the peptide sequence at SEQ ID NO 40240
atggcttcatcaaagaaacaccagtataaaccgttcgatgaacatcttcggctctctaggtccatcggtccagctcctagtgaccaaactccgaatggtgaaccccctaacggtcggctttcgagtgttttgcgggagcgcatcggttctcaagcgtgccccagccttcttacaagattaatttctagaagcgtgcaaaccattcagctacccgatcttgaatttgggacgccctttcttaccaatccctcaaaagtccctgtggatgagcctcctgggcctcctgcgatcgacgtccctgaggttcaagaagacggttcctggttcggccactacccttgtgtttcccaattcagcccccaaggctgtgataagcacaacgcggataacaagccgatattctgcaacgcgcgcctaccgccaatgcgccatgcacccttggatatgcagagcggtaccgcttccaataccgtcaaagtcgcacctggtggagacgagccagcaccaccaccctatacagctcgaacccacgtagtatctgcactgccgtcgagtttgttccattcgaagcttccattcgacctcgggtccgttgagacgatcatcccgatccaccgagatgttccctaccacctcgcattctatcatctcaactctgcacggcttcgaatccccgccgagacaaagatcaagttcgtagaagagctttcctgcagcggtagctccgttctgagcgaaaccggagatccgttcaagtggtccagtgacatctattttgacgatggggagcttttgcagatggaaaagatggaatgtcgctttgatgccacatccatccccttccagatgcttgacctctcatcatgcgcacacaacgcttatagactttcgccgcctgagttttatcgcgaaacaaaggccggattccaacaagcgagggtctcgttcactcacatatcctggacttatgaatccggctggtcacaaggccaagtgaactatatcgatacggtcaaaggttataggggtttcgtaagtcacgcaacacctcccccctcttataacgggtttggaacagagttgagactgattttcgagaatggaaggaaaattgttgtcacgcctgcttctgctccttactcgtag

SEQ ID NO: 40240 - protein, 381 aa, Muscodor strobelii
  misc_feature: SGI Peptide ID NO. 574022
MASSKKHQYKPFDEHLRLSRSIGPAPSDQTPNGEPPNGRLSSVLRERIGSQACPSLLTRLISRSVQTIQLPDLEFGTPFLTNPSKVPVDEPPGPPAIDVPEVQEDGSWFGHYPCVSQFSPQGCDKHNADNKPIFCNARLPPMRHAPLDMQSGTASNTVKVAPGGDEPAPPPYTARTHVVSALPSSLFHSKLPFDLGSVETIIPIHRDVPYHLAFYHLNSARLRIPAETKIKFVEELSCSGSSVLSETGDPFKWSSDIYFDDGELLQMEKMECRFDATSIPFQMLDLSSCAHNAYRLSPPEFYRETKAGFQQARVSFTHISWTYESGWSQGQVNYIDTVKGYRGFVSHATPPPSYNGFGTELRLIFENGRKIVVTPASAPYS

SEQ ID NO: 40241 - DNA, 176 bp, Muscodor strobelii
  misc_feature: SGI EST ID NO. CUFF.97343.0
  misc_feature: Variant of the nucleotide sequence at SEQ ID NO 40239
gcaccaccaccctatacagctcgaacccacgtagtatctgcactgccgtcgagtttgttccattcgaagcttccattcgacctcgggtccgttgagacgatcatcccgatccaccgagatgttccctaccacctcgcattctatcatctcaactctgcacggcttcgaatccccgc

SEQ ID NO: 40242 - DNA, 2541 bp, Muscodor strobelii
  misc_feature: SGI cDNA ID NO. 574023
  misc_feature: Encodes the peptide sequence at SEQ ID NO 40243
atgaaccctcccagacctcgccatggtggacctttagtccaaaacgaggaacaggagccaggtcatcatcacgaagctcgccgacgacaactcagacaagtcgagcgtcaacgagtagccgcggctcgaatctacgacgacatagagcctgtggtcagtgacccgtaccctttccaacctgcctatgtgcccgatccaggacatgggagtagacatggaggtgcaatgccgctggccgagaatcccatcatggagaagtcagtcatgatagcagatgcattccctttagatagcatccaagtagaacatcagcctcaaattcaacaacccattccaaatgtcatcccgcaagatatgatagacgagatcgtcgacgaggaatacgggcaaccaatgcgtgacctgcccacaaagctgaaaggctccggacatcattggtccacgcccaacctaacgcgccggtggaccgactccggcacgccctacatcaagctaccaggctggcgctatgatacaacacaaatattccgccatcgtgacttcgcaggccgtatcaagttgtcaccgctcgaagaccgatatcttcaccactatgacggctacctacgaaaactcatcgtagcaaccaccgacgagatctttgtcggcgagaatacgagcacatggagacgggcctatgccggctcagataagccctacgaagcattcaacggatgctacgccccagtcccatacaaattccacggcacagccaaagcatggtgtaactacctcgaaaacggacgcagcaacctccctccacctcagcgaaatgatcactaccgtgttctcaagccccgacatctctgtttcctaaataatcccgcatcgcaaaacacggaaggctttcgagtccgatcagtgatcgattggcaggctacagatggtatgggccagaatctggactatatcgttgtgacattctcacagaaacagtttgtttctggtcaggatataaatgctctgcaccatattgctgaagttgctgcgagacgggcaggggtcccagcttattggtgttcgtttgggtgtatgcaggtagaagctgaagtggaagccgatgtataccgcatctcagatgtcattcgtggatcccgcggcatcgtcatcgccgtcgggcaaccaaaagacatccaacagcccatgatgactgatacactgctgaagcaatggggctcgcgcatgtggacgtttcccgaagtcctactcagccccggagataccatctcggtttatactcgagatggggacttgaacaatccgatgatcattagcaagcgaaacttccctgaccgtgtctggcctagtctcaatgatcatgagcgacgatacctcgttgatcccaatcagcatgtcgaagatgcgaaggagtcacgtcagctcatcgatcattaccttgggaatctggaactgagtcgtcttgaactcgcaactattgctttgaagtgtctgtataacagacatacggacatgtggttaccgggcgatcatgcgtatgcgttgatggggctgttgagacttcggccgcaggttgacagtacagattcgcagttccaagctttcgctagaatctccctagcaaacgactccgaccgtctcctagagcgatatctctgtctcctccccgcaaccccagatcaagcctggcacgacatgagcgaccaataccactcctcgctctggtccatcgagccatactcccaagtcgcagcaatctgcaacgacgacaccattatcctcggtggagcccatggggcgagtatccgctggaagtcattcctccacgtccgttctatcaccgggaatagttggcgacggtacattgctgagaaactgacgcagtataacggcattatctttcttgtgtctattattgttattggtgttttgaatcagaatcccggcggtgtcattgtcggcgtgttgttgctcatccttgcgcttgctgtgtgggtcaacacgccgaagttgattcgaactgtgtatggtggcaagttcacgcaggtccaggcttgtctgttcgggtttgaggggtacctcaatgtgcctactatcgagagagctatcttcggaggtgcttttggtcgcatgaattggagtgccaatggaagtcctctcagtcggtccgaactcaacaagtacggcgagctggttggcatggatccgacaacagatcccgacgtgagagcgctcgtgacccaagccaagagtgcaagaccggggcaaatgaggatcttcacccttgtcgatacatacaatatggaagtgacgctgtttcaagctgcacgcccgccaacatgtgtcttcatgtgcgcaagcgagggcggtatgcagcgtgcaatcgcgtgttcatacgactggactacgcagactatgtatcgtgagactgtgttccgcatgcatacccatagtttgaacagaatggacagagttcccaggttcaagattgggatcaggaggcctgagatgccgtctcggcctgttgttgcgagcactgtctga

SEQ ID NO: 40243 - protein, 846 aa, Muscodor strobelii
  misc_feature: SGI Peptide ID NO. 574023
MNPPRPRHGGPLVQNEEQEPGHHHEARRRQLRQVERQRVAAARIYDDIEPVVSDPYPFQPAYVPDPGHGSRHGGAMPLAENPIMEKSVMIADAFPLDSIQVEHQPQIQQPIPNVIPQDMIDEIVDEEYGQPMRDLPTKLKGSGHHWSTPNLTRRWTDSGTPYIKLPGWRYDTTQIFRHRDFAGRIKLSPLEDRYLHHYDGYLRKLIVATTDEIFVGENTSTWRRAYAGSDKPYEAFNGCYAPVPYKFHGTAKAWCNYLENGRSNLPPPQRNDHYRVLKPRHLCFLNNPASQNTEGFRVRSVIDWQATDGMGQNLDYIVVTFSQKQFVSGQDINALHHIAEVAARRAGVPAYWCSFGCMQVEAEVEADVYRISDVIRGSRGIVIAVGQPKDIQQPMMTDTLLKQWGSRMWTFPEVLLSPGDTISVYTRDGDLNNPMIISKRNFPDRVWPSLNDHERRYLVDPNQHVEDAKESRQLIDHYLGNLELSRLELATIALKCLYNRHTDMWLPGDHAYALMGLLRLRPQVDSTDSQFQAFARISLANDSDRLLERYLCLLPATPDQAWHDMSDQYHSSLWSIEPYSQVAAICNDDTIILGGAHGASIRWKSFLHVRSITGNSWRRYIAEKLTQYNGIIFLVSIIVIGVLNQNPGGVIVGVLLLILALAVWVNTPKLIRTVYGGKFTQVQACLFGFEGYLNVPTIERAIFGGAFGRMNWSANGSPLSRSELNKYGELVGMDPTTDPDVRALVTQAKSARPGQMRIFTLVDTYNMEVTLFQAARPPTCVFMCASEGGMQRAIACSYDWTTQTMYRETVFRMHTHSLNRMDRVPRFKIGIRRPEMPSRPVVASTV

SEQ ID NO: 40244 - DNA, 489 bp, Muscodor strobelii
  misc_feature: SGI cDNA ID NO. 574024
  misc_feature: Encodes the peptide sequence at SEQ ID NO 40245
atgagagacgatgttgtcttattccacacagaggaggagtatatcggaagttgtcctttcgatgtcgaaccaggtgatcggatcttcgttgctctgggttgcaataatcctataatgctgagaccagtcgaagacgttaccttccgcgtactaggagaatgtcaggttgctggcttcatggatggtgaagctttgcttggcctgctgcctcgtccttggcgtgttgctccgcgggtcaacaacgatggatacgactggccctactatttcaatgacgagactggagttaaagttgaagaagacccacgccttgaaaagctgccagaggagtgggagcctctaaatcgcaaacgcactccgaacgacccttggcactttgcttggcatcgaaacaaagtgacaggagaagaaatcaactctgacccgcgtcttcttccggatgttttgaggaaaagaggagtggatgttcgaactataacgttagtgtga

SEQ ID NO: 40245 - protein, 162 aa, Muscodor strobelii
  misc_feature: SGI Peptide ID NO. 574024
MRDDVVLFHTEEEYIGSCPFDVEPGDRIFVALGCNNPIMLRPVEDVTFRVLGECQVAGFMDGEALLGLLPRPWRVAPRVNNDGYDWPYYFNDETGVKVEEDPRLEKLPEEWEPLNRKRTPNDPWHFAWHRNKVTGEEINSDPRLLPDVLRKRGVDVRTITLV

SEQ ID NO: 40246 - DNA, 789 bp, Muscodor strobelii
  misc_feature: SGI cDNA ID NO. 574025
  misc_feature: Reduced expression when VOC is produced
  misc_feature: Encodes the peptide sequence at SEQ ID NO 40247
atggcagcagacgcctccaacgcgccgttcatacggaatctcgcttccagcgaccgcaaactacgaaccgcctccctctcctccctacaaacattcctctcatcaacaacgcacgcgcgcaacctcacacccctcgacaatctaaaactctggaaaggcctctattacagcctctggatgtgcgacagacccataccccaacaaaatctctgcgccgaactagcatccctcatcgagctccttcccgacgacgcagtcgccccctggctttccgcattctgggagattatcggaaaagagtggacgagtatcgatgtctaccgccttgagaaattcttactcttagttaggagagtgctgggtgcaagtctagcgtgggtcgtcgcggcatcaagtaaagggaagaaagagagcagaaaaagaggggatatactcctggaagtcctatcaacctggccctttgacacgacggacgatctttcaagagtgccggtcgggctgagactgcatgtccttgatatttgggtggacgaagcagagaaactgtgcttgacgagcgaggaggagactggagaggaagggagacaattccttgatagactgggacttgtggttgaggctgttacgaggagtacgtgtaagcctgttaggttgagggctaaggagtcattggcggatgagagactgccttggaatagggagggtgaggcgaagaatggtgagaaagagggagaagaggagaaggacggggatggtgatggcgatagcttcgatgggtttgacgactga

SEQ ID NO: 40247 - protein, 262 aa, Muscodor strobelii
  misc_feature: SGI Peptide ID NO. 574025
  misc_feature (6)..(224): Pfam Id: PF05997 Pfam Desc: Nucleolar protein,Nop52
  misc_feature (6)..(178): Pfam Id: PF05997 Pfam Desc: Nucleolar protein,Nop52
  misc_feature: Useful for introducing or modulating the production of volatile compounds
MAADASNAPFIRNLASSDRKLRTASLSSLQTFLSSTTHARNLTPLDNLKLWKGLYYSLWMCDRPIPQQNLCAELASLIELLPDDAVAPWLSAFWEIIGKEWTSIDVYRLEKFLLLVRRVLGASLAWVVAASSKGKKESRKRGDILLEVLSTWPFDTTDDLSRVPVGLRLHVLDIWVDEAEKLCLTSEEETGEEGRQFLDRLGLVVEAVTRSTCKPVRLRAKESLADERLPWNREGEAKNGEKEGEEEKDGDGDGDSFDGFDD

SEQ ID NO: 40248 - DNA, 4539 bp, Muscodor strobelii
  misc_feature: SGI EST ID NO. CUFF.97457.0
  misc_feature: Variant of the nucleotide sequence at SEQ ID NO 40246
catccatcgcaatgcaccgtctcttgtctaaagcattacacgggaactaaaccgccaaagaaactgcgatatcctgattgcaatcgtccctaaggtcaacaatacatcacaatccttgcatcacaatcccgaaagccaatcgtcaaaaagcgcaaccaccgcgaccaccatctcctaccatccccgcgcattcagcgcccacagcccacaatggcagcagacgcctccaacgcgccgttcatacggaatctcgcttccagcgaccgcaaactacgaaccgcctccctctcctccctacaaacattcctctcatcaacaacgcacgcgcgcaacctcacacccctcgacaatctaaaactctggaaaggcctctattacagcctctggatgtgcgacagacccataccccaacaaaatctctgcgccgaactagcatccctcatcgagctccttcccgacgacgcagtcgccccctggctttccgcattctgggagattatcggaaaagagtggacgagtatcgatgtctaccgccttgagaaattcttactcttagttaggagagtgctgggtgcaagtctagcgtgggtcgtcgcggcatcaagtaaagggaagaaagagagcagaaaaagaggggatatactcctggaagtcctatcaacctggccctttgacacgacggacgatctttcaagagtgccggtcgggctgagactgcatgtccttgatatttgggtggacgaagcagagaaactgtgcttgacgagcgaggaggagactggagaggaagggagacaattccttgatagactgggacttgtggttgaggctgttacgaggagtacgtgtaagcctgttaggttgagggctaaggagtcattggcggatgagagactgccttggaatagggagggtgaggcgaagaatggtgagaaagagggagaagaggagaaggacggggatggtgatggcgatagcttcgatgggtttgacgactgagagtgatggcccccataaagagcaataagacagtccaagagcggactgggacatggagttaggagttggtatggatatatcccacggcgggtttcctcttcgtcgttacatttctagtcccaagcaaggatgatgatagagagagaggacacgggagaaaatctcatgtctaaattgcacatatccttttgccatgttctgtcctatgtttaccaggttatgcgttattcccatgactcgaaggaatgcccaacagcccaagacatatgccatccaacctcaatagaacttctcaattaaaggggtatctcgaactcaggatcgcttgagtctagtacatactaatacaatctccccttctcccttaataaactcacacaatacaatacaacaccctactcagccttctcccatcccatcggcccaaaagcatcgaacttgccactcttgcttatcatagtcgccaacccagggtgtacctcaacctggaaaggctcaaatggaatgcgctcgccatcaatgctgatatacccatctttctgattcttaggcgtaaacctataagcaacgactttccgataggatatcaatgagttgtcgtagaaacgtcccttttcgatgccagtcatgaggtcgatatattttgcggccgggatgtcgccgtcgtttatcgcgacgtccatgagcccgtcgtttgcgagggctgctgggaagaaattggcgttgggtgccatccatgccatctacatctccagtcagtgtcaagttgcgcgcgaatgtggatagagatagggagaggaagagacttacgtttccacaataaaagctccccatcttatcaaaagaaaacttctcccaatcctccggcacctcatcattcacggtcccaaacctcaagttcggcaacccgtcaccaacactctccactcccaaactctcctcgccctctttcttaaacctactctcctcacccctctgcacacgtcgataatgtgccttaataccctccttattctccatctccgtcttaaacgcaacatcacacggataaaccctcttactaaagatcctctgcacaacacccacatcaaaccgtgcggcaccaagccatctcatgttctccgtccccaaatcacactccgccacaatccccacactctgactcaaaaaggacaatagtctgcggtctccttgtgtgacgctcatcaaatcaacatccgtcctaacacccttaaccaccgcaagcgcacaatgactcggtcgatgagacccatttaaattcaaactcagcgcattcccgcttccgcctggtatatgcgcgagcgcgactttcttcaacgccctccccgcatcagggcgcttcgcaaatccgttcaggacttcgtatgccagcccatcaccagaaatcacgacgaccatgtcgtaggcttcgatgtcgagggcggcgcagatatctgtcccctcgccttgccgcgtggtttgtacttcgtcgatggtcatgcgtgcgtcgaggaatatgggtttgacgactttctcccagatttgtacagagtgcccggggccggcgtgggggtttattaggacttttgcgcggcggcggggttgtgcgttgccgtatgcgagggcgaggaggtgttcggaccatgcatttgcggtggcggtgggaacatcgttgagtcggtacgtggttttctcgcgggatagtgttgtttttgatttcgagattgtatagtggatggaaaggcagttggagtttgtggtgtcggaccagaggatgttgtagtatgggattgtgagggtggatggaccgctgccgagcgggatgccgcagagtttgggccggttgcgttttgcgaggcttttgtcttttattgtgagagaatctttctcgagagtgagggatacgccgtgggcgaggaggaggatgtcggggtttggatttggatctgcatctgtgatgaggctggtcgtttctgccatgatggtgtatagatgcgggtattgaaattagaaaagaatgaagtgaaaagagtggttggaagtagattaaaagagaagaatgaataatggtaaaacgaatgtctatggtcgaagcgatgaagttggatggggaccgtgatgtagttttaattgatgctttgaaacttttggagtccacgcccgcgtgttgtcgcgccgggttcaccgttggatcgcctatgagataaatagatggcacgtcttatcggcagagttaaatgtgcaattgcgtcgtttcttatccctcagtccttgtcgtctccaccacagctgccctcccccggttgcgaatgcgagcctcaatctctccactgttcttttatctgatccgaaatccttccaagatgacaattgttcgagacctgattggctcgcaactgtttctttacatgtgtcggagttttcgagatatgaatgtccttttgttcgatgaattcggttcgatatgggcatgaaaggtcgttgcctacctaaggtagctttatagcactttagccaatctccgcgggttccgaccgtcagggccgtcacaggtaagggtcgattggaaatgactaacagatgggcatacgacatactggccatgccacacgtatcgcatattgtatatacaacttctatcagtccaagatctaagatgcttctacagtaccccccaaatctaactctatcaatccaaatccaacttcacatcttactctccttcccctccgtcctccgcttcgccaaattcctgcccccatcaaccgcaagcgcaatgtgatggctcagcgcaacaatctcctcatccatatcaaaaatcacaatctcataatcataccgtccattcttcaccatcttcgtcatgaccctgacatgcaaccactctgttcccttcttcggtaagggtcttttgaagtctaaactcagggtaagagtcggataccaataccaacccttcgccaccgctttcttgccttcttctttgccgaggaccttctcttgtagcccttcgagcatttgtggccacatgtcggatacgaagccgattcccgcgtctgggaaggactcccctgattctaggcggatccattcgtctacaacgttgggcgctacgtgaccggtctttggtatgtacatttttgcgcgttgcacggctttgcgtttttcggcgtgtggcaagtcagtcaacagggcccattcttcatcttcaccacttgtcgcgagtttcgcgaagtccttgggcctgggcggtagaggtggatgtggtgtgtaataggttgggaacgtcatgccctcttctttctccatgtgcgagttcgttatgtacgccacgacctcttctcggccgtcctgcatgagtgttacgtgtactgatgaggtcatgcgcccgagcttcatatccctgactttgaatgtcgccgggccgacattggttcgtcgcaggaattccgcgtggaatgcgatggtgtgtggttgcgactgtgaggatagtgtgctgctgaagtgtgcttttgcgacttgcaagagggtggccgttac

SEQ ID NO: 40249 - DNA, 1518 bp, Muscodor strobelii
  misc_feature: SGI cDNA ID NO. 574026
  misc_feature: Reduced expression when VOC is produced
  misc_feature: Encodes the peptide sequence at SEQ ID NO 40250
atggcagaaacgaccagcctcatcacagatgcagatccaaatccaaaccccgacatcctcctcctcgcccacggcgtatccctcactctcgagaaagattctctcacaataaaagacaaaagcctcgcaaaacgcaaccggcccaaactctgcggcatcccgctcggcagcggtccatccaccctcacaatcccatactacaacatcctctggtccgacaccacaaactccaactgcctttccatccactatacaatctcgaaatcaaaaacaacactatcccgcgagaaaaccacgtaccgactcaacgatgttcccaccgccaccgcaaatgcatggtccgaacacctcctcgccctcgcatacggcaacgcacaaccccgccgccgcgcaaaagtcctaataaacccccacgccggccccgggcactctgtacaaatctgggagaaagtcgtcaaacccatattcctcgacgcacgcatgaccatcgacgaagtacaaaccacgcggcaaggcgaggggacagatatctgcgccgccctcgacatcgaagcctacgacatggtcgtcgtgatttctggtgatgggctggcatacgaagtcctgaacggatttgcgaagcgccctgatgcggggagggcgttgaagaaagtcgcgctcgcgcatataccaggcggaagcgggaatgcgctgagtttgaatttaaatgggtctcatcgaccgagtcattgtgcgcttgcggtggttaagggtgttaggacggatgttgatttgatgagcgtcacacaaggagaccgcagactattgtcctttttgagtcagagtgtggggattgtggcggagtgtgatttggggacggagaacatgagatggcttggtgccgcacggtttgatgtgggtgttgtgcagaggatctttagtaagagggtttatccgtgtgatgttgcgtttaagacggagatggagaataaggagggtattaaggcacattatcgacgtgtgcagaggggtgaggagagtaggtttaagaaagagggcgaggagagtttgggagtggagagtgttggtgacgggttgccgaacttgaggtttgggaccgtgaatgatgaggtgccggaggattgggagaagttttcttttgataagatggggagcttttattgtggaaacatggcatggatggcacccaacgccaatttcttcccagcagccctcgcaaacgacgggctcatggacgtcgcgataaacgacggcgacatcccggccgcaaaatatatcgacctcatgactggcatcgaaaagggacgtttctacgacaactcattgatatcctatcggaaagtcgttgcttataggtttacgcctaagaatcagaaagatgggtatatcagcattgatggcgagcgcattccatttgagcctttccaggttgaggtacaccctgggttggcgactatgataagcaagagtggcaagttcgatgcttttgggccgatgggatgggagaaggctgagtag

SEQ ID NO: 40250 - protein, 505 aa, Muscodor strobelii
  misc_feature: SGI Peptide ID NO. 574026
  misc_feature (130)..(263): Pfam Id: PF00781 Pfam Desc: Diacylglycerol kinase catalytic domain (presumed)
  misc_feature (115)..(493): SWISSPROT Homolog: EC 2.7.1.91 Sphinganine kinase
  misc_feature: Useful for introducing or modulating the production of volatile compounds
MAETTSLITDADPNPNPDILLLAHGVSLTLEKDSLTIKDKSLAKRNRPKLCGIPLGSGPSTLTIPYYNILWSDTTNSNCLSIHYTISKSKTTLSREKTTYRLNDVPTATANAWSEHLLALAYGNAQPRRRAKVLINPHAGPGHSVQIWEKVVKPIFLDARMTIDEVQTTRQGEGTDICAALDIEAYDMVVVISGDGLAYEVLNGFAKRPDAGRALKKVALAHIPGGSGNALSLNLNGSHRPSHCALAVVKGVRTDVDLMSVTQGDRRLLSFLSQSVGIVAECDLGTENMRWLGAARFDVGVVQRIFSKRVYPCDVAFKTEMENKEGIKAHYRRVQRGEESRFKKEGEESLGVESVGDGLPNLRFGTVNDEVPEDWEKFSFDKMGSFYCGNMAWMAPNANFFPAALANDGLMDVAINDGDIPAAKYIDLMTGIEKGRFYDNSLISYRKVVAYRFTPKNQKDGYISIDGERIPFEPFQVEVHPGLATMISKSGKFDAFGPMGWEKAE

SEQ ID NO: 40251 - DNA, 4411 bp, Muscodor strobelii
  misc_feature: SGI EST ID NO. CUFF.97458.1
  misc_feature: Variant of the nucleotide sequence at SEQ ID NO 40249
caagatccgggcttgccagactcatcatttcaacttcatgttgtttacgattcatgtcatagagtcatttcgtctcatttcacgatcgagcgagacaacatggcgccgactttcgcagaagcgatcgcagtgaaagcggtggactctcacacatacagcgccagctttctctcggaatggtgcatcggctctgtgacacacggcggtgtagtaacggccaccctcttgcaagtcgcaaaagcacacttcagcagcacactatcctcacagtcgcaaccacacaccatcgcattccacgcggaattcctgcgacgaaccaatgtcggcccggcgacattcaaagtcagggatatgaagctcgggcgcatgacctcatcagtacacgtaacactcatgcaggacggccgagaagaggtcgtggcgtacataacgaactcgcacatggagaaagaagagggcatgacgttcccaacctattacacaccacatccacctctaccgcccaggcccaaggacttcgcgaaactcgcgacaagtggtgaagatgaagaatgggccctgttgactgacttgccacacgccgaaaaacgcaaagccgtgcaacgcgcaaaaatgtacataccaaagaccggtcacgtagcgcccaacgttgtagacgaatggatccgcctagaatcaggggagtccttcccagacgcgggaatcggcttcgtatccgacatgtggccacaaatgctcgaagggctacaagagaaggtcctcggcaaagaagaaggcaagaaagcggtggcgaagggttggtattggtatccgactcttaccctgagtttagacttcaaaagacccttaccgaagaagggaacagagtggttgcatgtcagggtcatgacgaagatggtgaagaatggacggtatgattatgagattgtgatttttgatatggatgaggagattgttgcgctgagccatcacattgcgcttgcggttgatgggggcaggaatttggcgaagcggaggacggaggggaaggagagtaagatgtgaagttggatttggattgatagagttagatttggggggtactgtagaagcatcttagatcttggactgatagaagttgtatatacaatatgcgatacgtgtggcatggccagtatgtcgtatgcccatctgttagtcatttccaatcgacccttacctgtgacggccctgacggtcggaacccgcggagattggctaaagtgctataaagctaccttaggtaggcaacgacctttcatgcccatatcgaaccgaattcatcgaacaaaaggacattcatatctcgaaaactccgacacatgtaaagaaacagttgcgagccaatcaggtctcgaacaattgtcatcttggaaggatttcggatcagataaaagaacagtggagagattgaggctcgcattcgcaaccgggggagggcagctgtggtggagacgacaaggactgagggataagaaacgacgcaattgcacatttaactctgccgataagacgtgccatctatttatctcataggcgatccaacggtgaacccggcgcgacaacacgcgggcgtggactccaaaagtttcaaagcatcaattaaaactacatcacggtccccatccaacttcatcgcttcgaccatagacattcgttttaccattattcattcttctcttttaatctacttccaaccactcttttcacttcattcttttctaatttcaatacccgcatctatacaccatcatggcagaaacgaccagcctcatcacagatgcagatccaaatccaaaccccgacatcctcctcctcgcccacggcgtatccctcactctcgagaaagattctctcacaataaaagacaaaagcctcgcaaaacgcaaccggcccaaactctgcggcatcccgctcggcagcggtccatccaccctcacaatcccatactacaacatcctctggtccgacaccacaaactccaactgcctttccatccactatacaatctcgaaatcaaaaacaacactatcccgcgagaaaaccacgtaccgactcaacgatgttcccaccgccaccgcaaatgcatggtccgaacacctcctcgccctcgcatacggcaacgcacaaccccgccgccgcgcaaaagtcctaataaacccccacgccggccccgggcactctgtacaaatctgggagaaagtcgtcaaacccatattcctcgacgcacgcatgaccatcgacgaagtacaaaccacgcggcaaggcgaggggacagatatctgcgccgccctcgacatcgaagcctacgacatggtcgtcgtgatttctggtgatgggctggcatacgaagtcctgaacggatttgcgaagcgccctgatgcggggagggcgttgaagaaagtcgcgctcgcgcatataccaggcggaagcgggaatgcgctgagtttgaatttaaatgggtctcatcgaccgagtcattgtgcgcttgcggtggttaagggtgttaggacggatgttgatttgatgagcgtcacacaaggagaccgcagactattgtcctttttgagtcagagtgtggggattgtggcggagtgtgatttggggacggagaacatgagatggcttggtgccgcacggtttgatgtgggtgttgtgcagaggatctttagtaagagggtttatccgtgtgatgttgcgtttaagacggagatggagaataaggagggtattaaggcacattatcgacgtgtgcagaggggtgaggagagtaggtttaagaaagagggcgaggagagtttgggagtggagagtgttggtgacgggttgccgaacttgaggtttgggaccgtgaatgatgaggtgccggaggattgggagaagttttcttttgataagatggggagcttttattgtggaaacatggcatggatggcacccaacgccaatttcttcccagcagccctcgcaaacgacgggctcatggacgtcgcgataaacgacggcgacatcccggccgcaaaatatatcgacctcatgactggcatcgaaaagggacgtttctacgacaactcattgatatcctatcggaaagtcgttgcttataggtttacgcctaagaatcagaaagatgggtatatcagcattgatggcgagcgcattccatttgagcctttccaggttgaggtacaccctgggttggcgactatgataagcaagagtggcaagttcgatgcttttgggccgatgggatgggagaaggctgagtagggtgttgtattgtattgtgtgagtttattaagggagaaggggagattgtattagtatgtactagactcaagcgatcctgagttcgagatacccctttaattgagaagttctattgaggttggatggcatatgtcttgggctgttgggcattccttcgagtcatgggaataacgcataacctggtaaacataggacagaacatggcaaaaggatatgtgcaatttagacatgagattttctcccgtgtcctctctctctatcatcatccttgcttgggactagaaatgtaacgacgaagaggaaacccgccgtgggatatatccataccaactcctaactccatgtcccagtccgctcttggactgtcttattgctctttatgggggccatcactctcagtcgtcaaacccatcgaagctatcgccatcaccatccccgtccttctcctcttctccctctttctcaccattcttcgcctcaccctccctattccaaggcagtctctcatccgccaatgactccttagccctcaacctaacaggcttacacgtactcctcgtaacagcctcaaccacaagtcccagtctatcaaggaattgtctcccttcctctccagtctcctcctcgctcgtcaagcacagtttctctgcttcgtccacccaaatatcaaggacatgcagtctcagcccgaccggcactcttgaaagatcgtccgtcgtgtcaaagggccaggttgataggacttccaggagtatatcccctctttttctgctctctttcttccctttacttgatgccgcgacgacccacgctagacttgcacccagcactctcctaactaagagtaagaatttctcaaggcggtagacatcgatactcgtccactcttttccgataatctcccagaatgcggaaagccagggggcgactgcgtcgtcgggaaggagctcgatgagggatgctagttcggcgcagagattttgttggggtatgggtctgtcgcacatccagaggctgtaatagaggcctttccagagttttagattgtcgaggggtgtgaggttgcgcgcgtgcgttgttgatgagaggaatgtttgtagggaggagagggaggcggttcgta

SEQ ID NO: 40252 - DNA, 945 bp, Muscodor strobelii
  misc_feature: SGI cDNA ID NO. 574027
  misc_feature: Reduced expression when VOC is produced
  misc_feature: Encodes the peptide sequence at SEQ ID NO 40253
atggcgccgactttcgcagaagcgatcgcagtgaaagcggtggactctcacacatacagcgccagctttctctcggaatggtgcatcggctctgtgacacacggcggtgtagtaacggccaccctcttgcaagtcgcaaaagcacacttcagcagcacactatcctcacagtcgcaaccacacaccatcgcattccacgcggaattcctgcgacgaaccaatgtcggcccggcgacattcaaagtcagggatatgaagctcgggcgcatgacctcatcagtacacgtaacactcatgcaggacggccgagaagaggtcgtggcgtacataacgaactcgcacatggagaaagaagagggcatgacgttcccaacctattacacaccacatccacctctaccgcccaggcccaaggacttcgcgaaactcgcgacaagtggtgaagatgaagaatgggccctgttgactgacttgccacacgccgaaaaacgcaaagccgtgcaacgcgcaaaaatgtacataccaaagaccggtcacgtagcgcccaacgttgtagacgaatggatccgcctagaatcaggggagtccttcccagacgcgggaatcggcttcgtatccgacatgtggccacaaatgctcgaagggctacaagagaaggtcctcggcaaagaagaaggcaagaaagcggtggcgaagggttggtattggtatccgactcttaccctgagtttagacttcaaaagacccttaccgaagaagggaacagagtggttgcatgtcagggtcatgacgaagatggtgaagaatggacggtatgattatgagattgtgatttttgatatggatgaggagattgttgcgctgagccatcacattgcgcttgcggttgatgggggcaggaatttggcgaagcggaggacggaggggaaggagagtaagatgtga

SEQ ID NO: 40253 - protein, 314 aa, Muscodor strobelii
  misc_feature: SGI Peptide ID NO. 574027
  misc_feature: Useful for introducing or modulating the production of volatile compounds
MAPTFAEAIAVKAVDSHTYSASFLSEWCIGSVTHGGVVTATLLQVAKAHFSSTLSSQSQPHTIAFHAEFLRRTNVGPATFKVRDMKLGRMTSSVHVTLMQDGREEVVAYITNSHMEKEEGMTFPTYYTPHPPLPPRPKDFAKLATSGEDEEWALLTDLPHAEKRKAVQRAKMYIPKTGHVAPNVVDEWIRLESGESFPDAGIGFVSDMWPQMLEGLQEKVLGKEEGKKAVAKGWYWYPTLTLSLDFKRPLPKKGTEWLHVRVMTKMVKNGRYDYEIVIFDMDEEIVALSHHIALAVDGGRNLAKRRTEGKESKM

SEQ ID NO: 40254 - DNA, 4411 bp, Muscodor strobelii; identical to SEQ ID NO: 40251
  misc_feature: SGI EST ID NO. CUFF.97458.1
  misc_feature: Variant of the nucleotide sequence at SEQ ID NO 40252

SEQ ID NO: 40255 - DNA, 966 bp, Muscodor strobelii
  misc_feature: SGI cDNA ID NO. 574028
  misc_feature: Encodes the peptide sequence at SEQ ID NO 40256
atgcaggccaccgcaatcgagcagctccagcgccgagatatgcctagcatacacgagctgttcgttaaaagagacaatggcaacctttacttcggtgctgctaccgaatctgcaaagtcggacgccaacaaagggataatcaagaactatctcggacaggtgactcccgagttttctatgaagtggcgtaccctgcagcctgctgagggccagttcgacttcgcacaggccgacgctctagttaactgggctgtggcgaatggcaaattaatcagaggccataccctcctgtggtggaggaacgacctggatacgcctccgctgcctggttgggtcagatctatcactggcgcgaacagggccaaggccgttcttgagaaccatgtgaagacagtagtcggccatttcaaagggaagatcaggacagtacacgtcgtcaatgagattttcaacgacgacgctcaaaacacattccgtgactccgtgttttacaagctacttggcgaggaattcgtgaacatcgcctttcgtgccgcacgggaagcggacccaagtgcgaagctatgtatcaatgactatggtcttgacagtagcgacaagaacaagctaaaggttttagtcggcaaagtcaaagagtggagggcaaagggtacgactatcgatggcattggttcgcaaacgcacatctcgactggcaaatcggacaccaacgcagagtcgctttcgctcatggggagtgccgtcgatgaggtggcgataacggaactagacatctcaggtggattcgtgggcgaagactggtggaagattgtcaaggcttgcacatatcagcccaagtgcgtgggcatcactacctggggagttggcgacaaggactcgtggttgtataaggatgggcaaagaccattgctttgggatgataactacattgttgaagatcatggttactggagtatagctgattga

SEQ ID NO: 40256 - protein, 321 aa, Muscodor strobelii
  misc_feature: SGI Peptide ID NO. 574028
  misc_feature (16)..(314): Pfam Id: PF00331 Pfam Desc: Glycosyl hydrolase family 10
  misc_feature (16)..(309): Pfam Id: PF00331 Pfam Desc: Glycosyl hydrolase family 10
  misc_feature (10)..(309): SWISSPROT Homolog: EC 3.2.1.8 Endo-1,4-beta-xylanase
MQATAIEQLQRRDMPSIHELFVKRDNGNLYFGAATESAKSDANKGIIKNYLGQVTPEFSMKWRTLQPAEGQFDFAQADALVNWAVANGKLIRGHTLLWWRNDLDTPPLPGWVRSITGANRAKAVLENHVKTVVGHFKGKIRTVHVVNEIFNDDAQNTFRDSVFYKLLGEEFVNIAFRAAREADPSAKLCINDYGLDSSDKNKLKVLVGKVKEWRAKGTTIDGIGSQTHISTGKSDTNAESLSLMGSAVDEVAITELDISGGFVGEDWWKIVKACTYQPKCVGITTWGVGDKDSWLYKDGQRPLLWDDNYIVEDHGYWSIAD

SEQ ID NO: 40257 - DNA, 862 bp, Muscodor strobelii
  misc_feature: SGI EST ID NO. CUFF.97400.0
  misc_feature: Variant of the nucleotide sequence at SEQ ID NO 40255
gtcggccatttcaaagggaagatcaggacatgagacgtcgtcaatgagattttcaacgacgacgctcaaaacacattccgtgactccgtgttttacaagctacttggcgaggaattcgtgaacatcgcctttcgtgccgcacgggaagcggacccaagtgcgaagctatgtatcaatgactatggtcttgacagtagcgacaagaacaagctaaaggttttagtcggcaaagtcaaagagtggagggcaaagggtacgactatcgatggcattggttcgcaaacgcacatctcgactggcaaatcggacaccaacgcagagtcgctttcgctcatggggagtgccgtcgatgaggtggcgataacggaactagacatctcaggtggattcgtgggcgaagactggtggaagattgtcaaggcttgcacatatcagcccaagtgcgtgggcatcactacctggggagttggcgacaaggactcgtggttgtataaggatgggcaaagaccattgctttgggatgataactacattgttgaagatcatggttactggagtatagctgattgacttgagggcaaattctcccagtaatccagctatcagcgcataggtatcttttctgcgtggaaatgatttcggtgtcaaactcccacagtcgaactttcttcgtctcgcggtaggactcagctaagtcagaagggcgatggacataaatatcttgcttttctcgctgctaggttcaatacggtagtgacaagatgactccgtcacggtacactttgcaagagaaccttacgtcacttcagagggggtgcgaattgaaaaaaacgtcccaaatccttctagaatgcgatccaag

SEQ ID NO: 40258 - DNA, 846 bp, Muscodor strobelii
  misc_feature: SGI cDNA ID NO. 574029
  misc_feature: Encodes the peptide sequence at SEQ ID NO 40259
atgacgaaatcggctactcatgttttcgccaccgaggcgttgacactcccaaatccgttgaattcctccagtatcgctgaaaggaatctaaaacttgactctgccgtcagacatttcattgaacagcatgagcgtatcatggccgtggtgccatacggcaattccaactgggcaactacggctaagattaccactctcacgaccaaccgtcacgtgaagaagtacttcttgaagcttgtacgcggcgacttggccgaagagcgtgtcatctcagagttcaaatgcatggccgagctctaccgcactgttcccgatattgtgccaatgccatgtagcctgggaaagtgcattgaaactgatgcttatttcttcctgagcgagtatgtgcctattgctataggtggcttgcctgagccatgccctagacaagatgccgccatgcatatcatcctgaataaagttataccgcgacttttagaccctcttgaggcagcagggcggacagtcaagccatgtctcattcatggagatctctgggaggacaatattggtatgaacgtagaaacgggaggtatcttcatttttgactgcgctgcctactatgcgcaccatgagatgggtgtagccatgtggcgagtaaagcatcacaagatgcaagcacctgaataccgtgaggaatattttcggaactatcccccagatgagcctgtggcagagtctgacgaccgcggtcgtctatatagcttgaaagagagcattatgtactcagcactaaaaccaggccaccgcgcaaggaaagaggcattgcaggacatgcgctacctgataaggaagtatgttaaataa

SEQ ID NO: 40259 - protein, 281 aa, Muscodor strobelii
  misc_feature: SGI Peptide ID NO. 574029
  misc_feature (170)..(201): Pfam Id: PF03881 Pfam Desc: Fructosamine kinase
MTKSATHVFATEALTLPNPLNSSSIAERNLKLDSAVRHFIEQHERIMAVVPYGNSNWATTAKITTLTTNRHVKKYFLKLVRGDLAEERVISEFKCMAELYRTVPDIVPMPCSLGKCIETDAYFFLSEYVPIAIGGLPEPCPRQDAAMHIILNKVIPRLLDPLEAAGRTVKPCLIHGDLWEDNIGMNVETGGIFIFDCAAYYAHHEMGVAMWRVKHHKMQAPEYREEYFRNYPPDEPVAESDDRGRLYSLKESIMYSALKPGHRARKEALQDMRYLIRKYVK

SEQ ID NO: 40260 - DNA, 1395 bp, Muscodor strobelii
  misc_feature: SGI EST ID NO. CUFF.97407.0
  misc_feature: Variant of the nucleotide sequence at SEQ ID NO 40258
ctgacatagggacatgagaaatggaattatgcagttacaggaagctatattaggccatgttacatcacactgtaagaaacggcggcggtgacctgtccttagtgtacgacagatagaaaaactcaaccgtgttgaaatcgagctacgacaatgacgaaatcggctactcatgttttcgccaccgaggcgttgacactcccaaatccgttgaattcctccagtatcgctgaaaggaatctaaaacttgactctgccgtcagacatttcattgaacagcatgagcgtatcatggccgtggtgccatacggcaattccaactgggcaactacggctaagattaccactctcacgaccaaccgtcacgtgaagaagtacttcttgaagcttgtacgcggcgacttggccgaagagcgtgtcatctcagagttcaaatgcatggccgagctctaccgcactgttcccgatattgtgccaatgccatgtagcctgggaaagtgcattgaaactgatgcttatttcttcctgagcgagtatgtgcctattgctataggtggcttgcctgagccagtacagttaggggagcatatcgcgaagcttcatcacgaaagtatttctccaaccggcaaatttggattttttgttacgccgtatgacggaaaactcccactgaacaccagctgggatagtagctgggtgtcattttttcgaaagctactatatggtgtttatacgatggacataaagttcaacggaaaatgccctagacaagatgccgccatgcatatcatcctgaataaagttataccgcgacttttagaccctcttgaggcagcagggcggacagtcaagccatgtctcattcatggagatctctgggaggacaatattggtatgaacgtagaaacgggaggtatcttcatttttgactgcgctgcctactatgcgcaccatgagatgggtgtagccatgtggcgagtaaagcatcacaagatgcaagcacctgaataccgtgaggaatattttcggaactatcccccagatgagcctgtggcagagtctgacgaccgcggtcgtctatatagcttgaaagagagcattatgtactcagcactaaaaccaggccaccgcgcaaggaaagaggcattgcaggacatgcgctacctgataaggaagtatgttaaataaactagattgaattgctgcatgactagattttagagtttgatagacagttatctttggatgcatggcctcaattatatggttcgaatctgatcagttcaagattgattcaaaagcctcgtaagagcaatcgacgctagtatctgctacttcatattgcaacactgctcatctagtgtccttcactcctgctggtatacctgttgcgaaatg

SEQ ID NO: 40261 - DNA, 1716 bp, Muscodor strobelii
  misc_feature: SGI cDNA ID NO. 574030
  misc_feature: Elevated expression when VOC is produced
  misc_feature: Encodes the peptide sequence at SEQ ID NO 40262
atgcgcggggggtctgtgtcgtccacgcctattgtgacggagataaacccggtaacgtcaccagctgcaacagattcagctcctatacatcaattcaacgaacagaccaattatgtgcccaggaggacaatcatcacgatcttcttggcatgtgctagtgtagatctgattgctctcatagatcaaaccacgcttgcagccagtctgtacatagtagccgatgcacttggcggtggtgatcagatctcatgggtatccaatggtttctttatcacctcaactgtcggccaattactgtacggtcgcctctcagatatttggtctcgtaaggtaatattattaatcggcctggctatattcttcctcggctcccttgcatcctccttggcgaatacggtaacccagcttatcgtgttccgtgcgctcacaggtgtcggtggtggtggtttgatgaccgtggcacagctcatcgtgagtgacgttgtaccgctacgagaaagaggaaagtaccaaggtattcttggtgctgtcgtagctatcgccaatggtatcggtcccgtgattggcggcgctttggcatcaggctcaaagaatggatggcgaaatatctttcgactacaactgccgcttaccgttcttacaacgctgtgtgttgtgttctacatgcctttgaagaaggttgaaggtgactggaagctaaaactgagggccgttgactttcccggtattctacttgtccttggcggtacaacattgttcctccttggtgtctcgtggggtggagtgtactactcgtgggattctacgcacgttgttgcgaccattgtcgtgggtttcgctctgggcgttggtttcgtgctatggcaatggagaggggcaaaatatcctctcatacccctccatgttttcaagtcaaagattgtcaatggcgcatgtttgactatggcaataaatggctggaattttgtcgtccaggtgtactacatacctacattctatcaactggcatatgggtactctgctacacaagccggcgctctgctattgccgatcacattgcttcaaactgccagcagcacactttctggactcatcgttcactgggtaggacgttatcgtgaatgtgtactcttcgggtggcttgtatgggccattggtcttggccttatgtcgacgcttgacgaacattccggccttggcaagcaggtgggatatagtctgctaataggtataggtgtgggcaatacgctacagccagccctgattgcagttcaagcaggggttgaaaggcgagacatggctgttgtaacgtctttccgaaactttgtgagaaaccttggggccacgattggcctggctgtctgtgcaacgttattgaacaatgtcattgccggttcaatttcatcgctgtcactcagtaaagaagatgcgtcgagcctcctcacaaccccgcagacttatttgagctcgcttcctttggacgaggctgatcacatacgtactgttctggttcccgcgtatcgacacgctttccggattattttccttctgggggcaggattagcggcctttgcatttgtgcttgcctttttcctgatgccacaggtagaactctcgcggccagatgatgcaaagctcaaagaggaagggcgacaacgacaactggatgaaaagaaaaatgtttcaggtgattcaacaccgcaagctgcggcgtag

SEQ ID NO: 40262 - protein, 571 aa, Muscodor strobelii
  misc_feature: SGI Peptide ID NO. 574030
  misc_feature (51)..(452): Pfam Id: PF07690 Pfam Desc: Major Facilitator Superfamily
  misc_feature (81)..(220): Pfam Id: PF00083 Pfam Desc: Sugar (and other) transporter
  misc_feature: Useful for introducing or modulating the production of volatile compounds
MRGGSVSSTPIVTEINPVTSPAATDSAPIHQFNEQTNYVPRRTIITIFLACASVDLIALIDQTTLAASLYIVADALGGGDQISWVSNGFFITSTVGQLLYGRLSDIWSRKVILLIGLAIFFLGSLASSLANTVTQLIVFRALTGVGGGGLMTVAQLIVSDVVPLRERGKYQGILGAVVAIANGIGPVIGGALASGSKNGWRNIFRLQLPLTVLTTLCVVFYMPLKKVEGDWKLKLRAVDFPGILLVLGGTTLFLLGVSWGGVYYSWDSTHVVATIVVGFALGVGFVLWQWRGAKYPLIPLHVFKSKIVNGACLTMAINGWNFVVQVYYIPTFYQLAYGYSATQAGALLLPITLLQTASSTLSGLIVHWVGRYRECVLFGWLVWAIGLGLMSTLDEHSGLGKQVGYSLLIGIGVGNTLQPALIAVQAGVERRDMAVVTSFRNFVRNLGATIGLAVCATLLNNVIAGSISSLSLSKEDASSLLTTPQTYLSSLPLDEADHIRTVLVPAYRHAFRIIFLLGAGLAAFAFVLAFFLMPQVELSRPDDAKLKEEGRQRQLDEKKNVSGDSTPQAAA

SEQ ID NO: 40263 - DNA, 2078 bp, Muscodor strobelii
  misc_feature: SGI EST ID NO. CUFF.97446.0
  misc_feature: Variant of the nucleotide sequence at SEQ ID NO 40261
gcgcatgcgactaccgtccgacaaagctagattttcctgtgtatactagtcgttgtttcatcccgcctacatatcgttcagctatttctgagcaagcctgactggttatacttgattacgcacaaataggtacaacatgcgcggggggtctgtgtcgtccacgcctattgtgacggagataaacccggtaacgtcaccagctgcaacagattcagctcctatacatcaattcaacgaacagaccaattatgtgcccaggaggacaatcatcacgatcttcttggcatgtgctagtgtagatctgattgctctcatagatcaaaccacgcttgcagccagtctgtacatagtagccgatgcacttggcggtggtgatcagatctcatgggtatccaatggtttctttatcacctcaactgtcggccaattactgtacggtcgcctctcagatatttggtctcgtaaggtaatattattaatcggcctggctatattcttcctcggctcccttgcatcctccttggcgaatacggtaacccagcttatcgtgttccgtgcgctcacaggtgtcggtggtggtggtttgatgaccgtggcacagctcatcgtgagtgacgttgtaccgctacgagaaagaggaaagtaccaaggtattcttggtgctgtcgtagctatcgccaatggtatcggtcccgtgattggcggcgctttggcatcaggctcaaagaatggatggcgaaatatctttcgactacaactgccgcttaccgttcttacaacgctgtgtgttgtgttctacatgcctttgaagaaggttgaaggtgactggaagctaaaactgagggccgttgactttcccggtattctacttgtccttggcggtacaacattgttcctccttggtgtctcgtggggtggagtgtactactcgtgggattctacgcacgttgttgcgaccattgtcgtgggtttcgctctgggcgttggtttcgtgctatggcaatggagaggggcaaaatatcctctcatacccctccatgttttcaagtcaaagattgtcaatggcgcatgtttgactatggcaataaatggctggaattttgtcgtccaggtgtactacatacctacattctatcaactggcatatgggtactctgctacacaagccggcgctctgctattgccgatcacattgcttcaaactgccagcagcacactttctggactcatcgttcactgggtaggacgttatcgtgaatgtgtactcttcgggtggcttgtatgggccattggtcttggccttatgtcgacgcttgacgaacattccggccttggcaagcaggtgggatatagtctgctaataggtataggtgtgggcaatacgctacagccagccctgattgcagttcaagcaggggttgaaaggcgagacatggctgttgtaacgtctttccgaaactttgtgagaaaccttggggccacgattggcctggctgtctgtgcaacgttattgaacaatgtcattgccggttcaatttcatcgctgtcactcagtaaagaagatgcgtcgagcctcctcacaaccccgcagacttatttgagctcgcttcctttggacgaggctgatcacatacgtactgttctggttcccgcgtatcgacacgctttccggattattttccttctgggggcaggattagcggcctttgcatttgtgcttgcctttttcctgatgccacaggtagaactctcgcggccagatgatgcaaagctcaaagaggaagggcgacaacgacaactggatgaaaagaaaaatgtttcaggtgattcaacaccgcaagctgcggcgtagcatagccattaggattcttgaaccttagtactggactttgcgatccgtatacttctaaaagttatgacaacagtacgtgttttgttctaacgaggcggggccacgtgcgtggattttgtaaacctattgcatggatgagcatttggctcgtgctaaaattagcgaagcaacgcctgcatatttctaacatcaggaacgagtctgagagaagactagtcaaccacca

SEQ ID NO: 40264 - DNA, 1599 bp, Muscodor strobelii
  misc_feature: SGI cDNA ID NO. 574031
  misc_feature: Elevated expression when VOC is produced
  misc_feature: Encodes the peptide sequence at SEQ ID NO 40265
atggcggagataaatcatctcaatgtttacaaggggccggaggctgtgagccagtactttgatcctgactcaacaccgccgctgccactcgtagagataccaaagtgcctcaacccttaccgagaagatggtgttcgcatctatgcaaagatgatgacgatgcaccctgcaaataatgtcaagtgtatgccagcaatgaatctacttgagaaggcggtagtgccaggcaaaacagaaacaatcgtcgagtatagctccggatcgacggtaatatcaatgtctctagttgcaagggcggtctacggtataacagacgtccgcgcattcttgtccaataagacaagcggtgctaaactgaaactcatgaggtttttcggccttaacttaacactatttggtgggccctcacagccagaaccatgtgatgataggggtggcatccgcgcagctcagagactagcgcaggagtctggtcatagtgttgtcaaccccgaccagtacggaaatgatgataactggaaatcgcatgtgcggtggacggggcctcaaattctaaatcaattgcctgagatcaatcttatctgcgctgggatgggaacatctggcactatcactggcctgggcacttacttcaagaaagcaaagccttcagtatatcgtctcggtgttgtcaccgctgcaggagatagagttcccggcccgcgctcatacgcactgctagcgcccgttgagtttccatggaaagcagcaacagatcacattgaacatgtaggctcatacgattcattctcgttgtcactagatctctgccgcgagggcatagtctgtgggccgtcatcgggtttcaacttgaaaggcctctaccaattattagagaaacggaaggtagatgggtcactcaaggaccttgccggagccgacggccagattcactgtgtatttctctgctgcgatcttccatatcagtacatcgacgaatactatgataagctaggcgagacgaggttcccaactatcactaatcaggaactgacgaaagtggataagtatcggtacgacgaagcttgggagcgtacatgtgcagaggtgctgcgcgattacttcgaggtcaaggacatgcttagcctgatctgttgccttcgctcggcagccgggaacctgccgctgcacgatgtcctagcccccaaagacgatgtatccatcctagacttacgacaggctgaagattttgcgacatatagtcttcctgttgcgatcaatttgcccgcagcccgcgcttcgagcccaagtcctttctttgcccctgacttgatgacaaaattgtggacgcatctagagcaaacatttaacaatctcgatgagaatgtgacgctgttagcacaaaataaacgtgtccttgtactttgttatgatggtgatagtgcaagggttgctacgagcgtgttgcgtgcaaagggctacgtcgcagagagtgtgcgtggtggcttctctaacttttcaccccttgagccggttatgcttggtaccaacagtgatcttaaaaccagtccatggctgaaggatactgctgcgacagtaaaggttctcaatgtaggatag

SEQ ID NO: 40265 - protein, 532 aa, Muscodor strobelii
  misc_feature: SGI Peptide ID NO. 574031
  misc_feature (22)..(305): Pfam Id: PF00291 Pfam Desc: Pyridoxal-phosphate dependent enzyme
  misc_feature (45)..(229): Pfam Id: PF00291 Pfam Desc: Pyridoxal-phosphate dependent enzyme
  misc_feature (29)..(329): SWISSPROT Homolog: EC 2.5.1.47 Cysteine synthase
  misc_feature: Useful for introducing or modulating the production of volatile compounds
MAEINHLNVYKGPEAVSQYFDPDSTPPLPLVEIPKCLNPYREDGVRIYAKMMTMHPANNVKCMPAMNLLEKAVVPGKTETIVEYSSGSTVISMSLVARAVYGITDVRAFLSNKTSGAKLKLMRFFGLNLTLFGGPSQPEPCDDRGGIRAAQRLAQESGHSVVNPDQYGNDDNWKSHVRWTGPQILNQLPEINLICAGMGTSGTITGLGTYFKKAKPSVYRLGVVTAAGDRVPGPRSYALLAPVEFPWKAATDHIEHVGSYDSFSLSLDLCREGIVCGPSSGFNLKGLYQLLEKRKVDGSLKDLAGADGQIHCVFLCCDLPYQYIDEYYDKLGETRFPTITNQELTKVDKYRYDEAWERTCAEVLRDYFEVKDMLSLICCLRSAAGNLPLHDVLAPKDDVSILDLRQAEDFATYSLPVAINLPAARASSPSPFFAPDLMTKLWTHLEQTFNNLDENVTLLAQNKRVLVLCYDGDSARVATSVLRAKGYVAESVRGGFSNFSPLEPVMLGTNSDLKTSPWLKDTAATVKVLNVG

SEQ ID NO: 40266 - DNA, 2130 bp, Muscodor strobelii
  misc_feature: SGI EST ID NO. CUFF.97427.0
  misc_feature: Variant of the nucleotide sequence at SEQ ID NO 40264
aggagacagtacgaaggcttattgctctaccatgatcccagtcagctaaaaaaatacttatataagtctacgaccaaacgattgtctttcccgtattttgaatgttcccctagataaaataccattcacaaaaagatggcggagataaatcatctcaatgtttacaaggggccggaggctgtgagccagtactttgatcctgactcaacaccgccgctgccactcgtagagataccaaagtgcctcaacccttaccgagaagatggtgttcgcatctatgcaaagatgatgacgatgcaccctgcaaataatgtcaagtgtatgccagcaatgaatctacttgagaaggcggtagtgccaggcaaaacagaaacaatcgtcgagtatagctccggatcgacggtaatatcaatgtctctagttgcaagggcggtctacggtataacagacgtccgcgcattcttgtccaataagacaagcggtgctaaactgaaactcatgaggtttttcggccttaacttaacactatttggtgggccctcacagccagaaccatgtgatgataggggtggcatccgcgcagctcagagactagcgcaggagtctggtcatagtgttgtcaaccccgaccagtacggaaatgatgataactggaaatcgcatgtgcggtggacggggcctcaaattctaaatcaattgcctgagatcaatcttatctgcgctgggatgggaacatctggcactatcactggcctgggcacttacttcaagaaagcaaagccttcagtatatcgtctcggtgttgtcaccgctgcaggagatagagttcccggcccgcgctcatacgcactgctagcgcccgttgagtttccatggaaagcagcaacagatcacattgaacatgtaggctcatacgattcattctcgttgtcactagatctctgccgcgagggcatagtctgtgggccgtcatcgggtttcaacttgaaaggcctctaccaattattagagaaacggaaggtagatgggtcactcaaggaccttgccggagccgacggccagattcactgtgtatttctctgctgcgatcttccatatcagtacatcgacgaatactatgataagctaggcgagacgaggttcccaactatcactaatcaggaactgacgaaagtggataagtatcggtacgacgaagcttgggagcgtacatgtgcagaggtgctgcgcgattacttcgaggtcaaggacatgcttagcctgatctgttgccttcgctcggcagccgggaacctgccgctgcacgatgtcctagcccccaaagacgatgtatccatcctagacttacgacaggctgaagattttgcgacatatagtcttcctgttgcgatcaatttgcccgcagcccgcgcttcgagcccaagtcctttctttgcccctgacttgatgacaaaattgtggacgcatctagagcaaacatttaacaatctcgatgagaatgtgacgctgttagcacaaaataaacgtgtccttgtactttgttatgatggtgatagtgcaagggttgctacgagcgtgttgcgtgcaaagggctacgtcgcagagagtgtgcgtggtggcttctctaacttttcaccccttgagccggttatgcttggtaccaacagtgatcttaaaaccagtccatggctgaaggatactgctgcgacagtaaaggttctcaatgtaggatagagtcctatatatgcaatctcgtcgaagatgggaatatgtccaccgttttaggatgagatgagcgggaggggaaattggcaagacaaaagcagtcgtgttaccaatttgcaattttattttctgcttgatgaactgagcactagtcaagccgtaccgggtcttgaagactcgccgaatcgtcagaactaatttcgttcgtcgcaagcgtctcagtccttcaatgcaacgcaattacctcggagggtggagtatgttctgggaaccagcgtcttccttccgggttcgccaatctcatcatctacactcaaccacgttgtcgccgaaaagttgcgccaaacacacattattgtatagactgcttgtcattactcaaatgcaggttgatggaagattctg

SEQ ID NO: 40267 - DNA, 2736 bp, Muscodor strobelii
  misc_feature: SGI cDNA ID NO. 574032
  misc_feature: Encodes the peptide sequence at SEQ ID NO 40268
atgagttctgatcgtgccatattgctggactcgacgtcgctgctcggatttgatacggcggcggaagtgaggtacggtacgagaaatgctgcgactctgtcgattgacagccttgaacaggcgccgccgagcggctatcatcgcattggaccacttgtgactcccgaggtcccgaactatcggcctattgtattgcgatggtggtttttggccgggctaagcatactctttgccattttcggaggattaatcgaatttgcaatccacgccctaccggtcaaggactcggcgctcacactcttctcgaggtcatttgatacaaacaatgtcgacagtaacgcgataagagcgtgggcacgactagaacagttagatcatgtcttcttgagcgaacagggatcgtcaaagatgtcgacacggtatgggttcaaaaagaaagggtcctacgataatcttaattatggcatcgaaaatatacaacagaagcaaatgacggaggcgaaggagatcacactgatcaaacctagcattgttgccaccacattgaccacgcacccaatcttgactactcaagcaccagagcgaccgctccgtgaatttggccatcacctataccaactccagccccggatcccgtctggaagcgactttggttcctttggtagcaccatcatcacgtttcactcgagccgcccacccctgagcggcgtcccgccgccacctctgagctctccgaccccaacgttcatgttgtcgagtactggggcagagcctccgctatcaacgctgacgatcattcaatccggttattccactactccaccttccactgcgggagctacacctcggaaatccaccagttcattacccgaatcagcgaatcataagtctaggaagtcgactggatcctacagcacggcaacatccgtaatcacgaacacaaagaaagtacagagcatagaggaagcatcaacagaatcaacagcatcgtcgtcaagtacacaggtagtggtagagatcattcaagtctcaagtggcatcccaacatcaacatcaatatttgaaatttcgcccgcgccggttacatcaacactcaccgactccaacggcacaccgaccgcaaccacgacaatcagtaacgcattcaagacaattattgagacgctgacgggctctggtggcacgccgacggcaaccgagactcttgccctcaagctgacttcgacgaccgcgacgctcacggcatatagcggtagtctaacaactcccgttacatacactatgcccgttacgtcgtcaatgatcacacagacagactcaaagggctcaccgacaaggacgctgactcttatcccgctctcatcggttccacccaacaatcttacattcgctactgtatcaacttcagcaactccaacacctaccaacactggagatgccgatattttcacgcaacacttcttcatctctcaagcagactacttcctcggtacgtttgctggcactctgatcacgacgctcctttcaattccgatccgcatggtgaacctgaatgcgcagcttcttcagccatttcatgagcttgcgtcgatggccggtgcgcccgcagcttatacactctgtcgcgaagctgggagcctaagtgcgctagtgcaggatattcggcaagtattccggggccgggtgccactgacactcctcaccacattgatggcgctcttctccgcagtcacaacgaccttttcatcggaggcccttgtgcttatgctacacggatcgtgtcgccatggcggcggtagcgcggccaattgcgcgtggacactgggcgtcgcgaccgctggcgcacgaatcaccgaagccctgctgtttttcatgtctgtgcaactcgctctatcactgctactgcttcgacgatggcgatcaggcgtggcagcgagcccctggagcatgagcggtatcatgcgggagctttcgcccaattcattcaagctggattattttgatgctggagggggccgactacaatatggaatcgtggttgtcagacgtggggacttcgatacagaaacaaagaagaacatcttctccttcggttctggtagcgctatgaagagctgcgtcgagagatttagatggaagcgacgtgaagctcccttgccgttcttcatactcagcatctatgggcgtctcttaattctcaccttcatactaggcatcattgctttaataggttattacaatggtccgaaaacatctcgatcctttgaaatgtttcttgacagtgaatcattcggggttagactactttttacagccatcggcgtggttgtcactctttcctgggaggcgcttttcactgctgtcgcgtacctcagcacctataagaggatggctaaatcgcctcaaaccgctcgtcattccattgggatctctccacccacgaacaccttctccgggttccgctcggcacttttagaacgcgacctatttcttggtttggtgactttcgctggcattctgtccgaattcttgcctgtcttgctgagcaatgtgccctaccaggtgacacagacactagatgttcatcttgtcagtacatggatatcggttactatcctcgcaatcatggcgctcgtggttgcaggttctttcttcgtctactggccgccttttcccgttgatgcccgcactattgcaggtgctgtcacagttctgactgctggtagggtccagtaa

SEQ ID NO: 40268 - protein, 911 aa, Muscodor strobelii
  misc_feature: SGI Peptide ID NO. 574032
MSSDRAILLDSTSLLGFDTAAEVRYGTRNAATLSIDSLEQAPPSGYHRIGPLVTPEVPNYRPIVLRWWFLAGLSILFAIFGGLIEFAIHALPVKDSALTLFSRSFDTNNVDSNAIRAWARLEQLDHVFLSEQGSSKMSTRYGFKKKGSYDNLNYGIENIQQKQMTEAKEITLIKPSIVATTLTTHPILTTQAPERPLREFGHHLYQLQPRIPSGSDFGSFGSTIITFHSSRPPLSGVPPPPLSSPTPTFMLSSTGAEPPLSTLTIIQSGYSTTPPSTAGATPRKSTSSLPESANHKSRKSTGSYSTATSVITNTKKVQSIEEASTESTASSSSTQVVVEIIQVSSGIPTSTSIFEISPAPVTSTLTDSNGTPTATTTISNAFKTIIETLTGSGGTPTATETLALKLTSTTATLTAYSGSLTTPVTYTMPVTSSMITQTDSKGSPTRTLTLIPLSSVPPNNLTFATVSTSATPTPTNTGDADIFTQHFFISQADYFLGTFAGTLITTLLSIPIRMVNLNAQLLQPFHELASMAGAPAAYTLCREAGSLSALVQDIRQVFRGRVPLTLLTTLMALFSAVTTTFSSEALVLMLHGSCRHGGGSAANCAWTLGVATAGARITEALLFFMSVQLALSLLLLRRWRSGVAASPWSMSGIMRELSPNSFKLDYFDAGGGRLQYGIVVVRRGDFDTETKKNIFSFGSGSAMKSCVERFRWKRREAPLPFFILSIYGRLLILTFILGIIALIGYYNGPKTSRSFEMFLDSESFGVRLLFTAIGVVVTLSWEALFTAVAYLSTYKRMAKSPQTARHSIGISPPTNTFSGFRSALLERDLFLGLVTFAGILSEFLPVLLSNVPYQVTQTLDVHLVSTWISVTILAIMALVVAGSFFVYWPPFPVDARTIAGAVTVLTAGRVQ

SEQ ID NO: 40269 - DNA, 1258 bp, Muscodor strobelii
  misc_feature: SGI EST ID NO. CUFF.97451.0
  misc_feature: Variant of the nucleotide sequence at SEQ ID NO 40267
caggtccctacttggccatccggaagttcgtcatgtacttggtactctaccgacttggggctcgaaggtatctaacgagactatacagcgggagctttcgcccaattcattcaagctggattattttgatgctggagggggccgactacaatatggaatcgtggttgtcagacgtggggacttcgatacagaaacaaagaagaacatcttctccttcggttctggtagcgctatgaagagctgcgtcgagagatttagatggaagcgacgtgaagctcccttgccgttcttcatactcagcatctatgggcgtctcttaattctcaccttcatactaggcatcattgctttaataggttattacaatggtccgaaaacatctcgatcctttgaaatgtttcttgacagtgaatcattcggggttagactactttttacagccatcggcgtggttgtcactctttcctgggaggcgcttttcactgctgtcgcgtacctcagcacctataagaggatggctaaatcgcctcaaaccgctcgtcattccattgggatctctccacccacgaacaccttctccgggttccgctcggcacttttagaacgcgacctatttcttggtttggtgactttcgctggcattctgtccgaattcttgcctgtcttgctgagcaatgtgccctaccaggtgacacagacactagatgttcatcttgtcagtacatggatatcggttactatcctcgcaatcatggcgctcgtggttgcaggttctttcttcgtctactggccgccttttcccgttgatgcccgcactattgcaggtgctgtcacagttctgactgctggtagggtccagtaatgactattgttgttgtacaagggggaagaagaaagctatctaaataggggctgagaaatgaggctatatacatcgtatcgtggcctgtgcgccacctaatccctgtatcgtcgacctcgttccgtgacaggtgctgcgtactatgtctgcgattcgcaactcctccagacaatggttacgtcggtattaacgattgaccgacaacttaatgttgatgaagatattttaaagggaaggtacacatttggggagatgatcggtgtttcaggcacgaggaggattggtgttgatacggatcaagatttatcaggtgcagagggtagacctctgacacgccaaatcgatttctttgcatcgagatggttgtttatgagtaataatcaatgactgatggag

SEQ ID NO: 40270 - DNA, 909 bp, Muscodor strobelii
  misc_feature: SGI cDNA ID NO. 574033
  misc_feature: Encodes the peptide sequence at SEQ ID NO 40271
atggctaccgaagtagacgcaaaagcggcaaccggcgttacacgccccggattccgggaaacgttggacacgattcccgcggctatggctgacctactagcttcatactctggggtgccaaaagaggatcagctctcacacgttgtgacactgcgtaacaacgcttatgcccgatttccattcccgtgtctcggcacgttccgcttcctagagctagacctcgcaacatggcacaaggcgtacaaagaccacgtgctagcgccgctatgccgagaggtcgcaccaggcgagccggagccgttgtttctcgacgtcggaacatgtcttggccaagacatacgtaagcttattgcagatggtgtgccccaacacaggctctggggttccgatatagatcctggattcatcgacgtaggcttcaagttcttcaaggatgaagacaagttcccccgcgatcactttttaactcctggcgacctgcttcggaccgacgacgctacttcagaagatcccttgacacttcttgacgataaggtgacaatactgggtatcactgctgtctttcatttgttcgatatggccgaacagaaacgtattgcgcaacgagtcttgaagctattgaggaaggataccggagtgcctgttcttgtagtcggtgctcaacacagcaatactagctggaatgaattctggcaagatgtgtgtgcgctgcctcaatggggcgatgtggttgagaaggttaaggtcaagtctgcgctgtacagccccagtcagcgtagagatggcactgcgcgaagtcccattgagggggaaaactggacggaggagtctgccaaagcggctggattggagagactgtggcaggaatttgaggtctggattaccttcaagtctcaagctttagcctag

SEQ ID NO: 40271 - protein, 302 aa, Muscodor strobelii
  misc_feature: SGI Peptide ID NO. 574033
MATEVDAKAATGVTRPGFRETLDTIPAAMADLLASYSGVPKEDQLSHVVTLRNNAYARFPFPCLGTFRFLELDLATWHKAYKDHVLAPLCREVAPGEPEPLFLDVGTCLGQDIRKLIADGVPQHRLWGSDIDPGFIDVGFKFFKDEDKFPRDHFLTPGDLLRTDDATSEDPLTLLDDKVTILGITAVFHLFDMAEQKRIAQRVLKLLRKDTGVPVLVVGAQHSNTSWNEFWQDVCALPQWGDVVEKVKVKSALYSPSQRRDGTARSPIEGENWTEESAKAAGLERLWQEFEVWITFKSQALA

SEQ ID NO: 40272 - DNA, 798 bp, Muscodor strobelii
  misc_feature: SGI cDNA ID NO. 574034
  misc_feature: Encodes the peptide sequence at SEQ ID NO 40273
atgaaagtcttcatagtctttgcccatcctgagccacagtctctcaatggatcacttctccgaacgacagtggatgaactcaagagtcaaggccatgagattcaggtgtcggacctgtacgctatgaactggaagtcgcaaatcgatcgcgccgatttccctcatctggcacctgatgctcgctttaaacctgcttgggcatcagcggaggccacaatgacaggcacgctcacggacgatgtgaaggctgagcaagagaagctgctttgggccgatatagtcattttccattatcctatatggtggctcagtatgcctgctattcttaagggctggtttgaaagagtgtactcattaggtttcgcatatggaatcggtgagcatagcgacaagaaatggggcgagagatatggcgagggtaaaatgaaaggaaaacgggcttggctcgttgtaacgaacggtgcaatgccggagcatttctcggcacgcggcatatcgggtccgatcgatgatgttctattcccggtcacgcatagtctcctatactaccctggcttcgacgtcttgccatcgttcgttgtgtacctagcggatcgcacagatgaggacactttcagagcgacggcagagaagcttcgagagagcgtgcgaaatctatctactacaaaacccattgcattccggccgcagaatggcggggagtatgatattcctagcttaacactaaagtcgggtcttggcgatgagactggctctggctttgcgctgcatgttcgcgcaataagggatccggcctag

SEQ ID NO: 40273 - protein, 265 aa, Muscodor strobelii
  misc_feature: SGI Peptide ID NO. 574034
  misc_feature (1)..(221): Pfam Id: PF02525 Pfam Desc: Flavodoxin-like fold
  misc_feature (2)..(229): SWISSPROT Homolog: EC 1.10.99.2 Ribosyldihydronicotinamide dehydrogenase (quinone)
MKVFIVFAHPEPQSLNGSLLRTTVDELKSQGHEIQVSDLYAMNWKSQIDRADFPHLAPDARFKPAWASAEATMTGTLTDDVKAEQEKLLWADIVIFHYPIWWLSMPAILKGWFERVYSLGFAYGIGEHSDKKWGERYGEGKMKGKRAWLVVTNGAMPEHFSARGISGPIDDVLFPVTHSLLYYPGFDVLPSFVVYLADRTDEDTFRATAEKLRESVRNLSTTKPIAFRPQNGGEYDIPSLTLKSGLGDETGSGFALHVRAIRDPA

SEQ ID NO: 40274 - DNA, 1112 bp, Muscodor strobelii
  misc_feature: SGI EST ID NO. CUFF.97436.0
  misc_feature: Variant of the nucleotide sequence at SEQ ID NO 40272
gccgagcgagtttcgttctgaactgttgaacatagcccagcggggagttacaatcgaccggcgcgggagaattaccgcagcagccagccgaacaactcttttgcaatagtgtgagatggttcatataaaccgccaggttaagtcttccctgaaaacagcgttgacaaacatacacaacgcaataagctgatcactcgtccatcaccatgaaagtcttcatagtctttgcccatcctgagccacagtctctcaatggatcacttctccgaacgacagtggatgaactcaagagtcaaggccatgagattcaggtgtcggacctgtacgctatgaactggaagtcgcaaatcgatcgcgccgatttccctcatctggcacctgatgctcgctttaaacctgcttgggcatcagcggaggccacaatgacaggcacgctcacggacgatgtgaaggctgagcaagagaagctgctttgggccgatatagtcattttccattatcctatatggtggctcagtatgcctgctattcttaagggctggtttgaaagagtgtactcattaggtttcgcatatggaatcggtgagcatagcgacaagaaatggggcgagagatatggcgagggtaaaatgaaaggaaaacgggcttggctcgttgtaacgaacggtgcaatgccggagcatttctcggcacgcggcatatcgggtccgatcgatgatgttctattcccggtcacgcatagtctcctatactaccctggcttcgacgtcttgccatcgttcgttgtgtacctagcggatcgcacagatgaggacactttcagagcgacggcagagaagcttcgagagagcgtgcgaaatctatctactacaaaacccattgcattccggccgcagaatggcggggagtatgatattcctagcttaacactaaagtcgggtcttggcgatgagactggctctggctttgcgctgcatgttcgcgcaataagggatccggcctaggtccatcctccgagaagtggaggaatggaaaaataatcatgtgataggctgccgttgcattaacccgataagaagttgcagcgaccacgaggagattgtcaatatcag

SEQ ID NO: 40275 - DNA, 2523 bp, Muscodor strobelii
  misc_feature: SGI cDNA ID NO. 574035
  misc_feature: Encodes the peptide sequence at SEQ ID NO 40276
atggagcctcctcaaaggccgcacactaatctattcgatgtctttttgcggttgcgaccgcctcaagcaggcaatgccaacgccgagaagttcttgctggtagaagaaccgacggatggtgacgcaccaactcatatcacactgaacccgccaatggatcgcagacgcgcaattgagaaatttgcattcacacgcgtgtttgaggaagatgctactcagcttgacttattccagggaaccaaggtcctcccgctcgttgagggcgtgcttgcgccccatggcggtgatggtacgaatgggttgctagcgacgctgggaatgacaggatcgggcaagacacatactatgctcggatcaagaagccagcgcggcttgacgcaactggctctcgatgttatctttcgctcgattcagtcaaacattgtcgactatgagtcgtcacctatgctggagacaagcattcgctcctcagataactcagaagcatccatatacaatgcttcggccttcctagagaatacctttggcgagggcgtagctccatcgcgtgctggatcaagagcagccacaccaatgattgtacgaacccagcgcactgatttcgcaaagtcttctaccttggccacgatttgtcccaacttaccgggcatctatcctgagagtccaggtgctagtgtacgacttgtacgacgtgaagacgagttgtctcatgtcacgcttctcaagacgcctccgggccagaagatactgaatcgacccctcaagacgccagtcacgtcttttaagtcaaagttgaccaatggctctccgaccaagaagcacttcatgaactccacgtcagctgctcaaaacaagaccgtaactaaatgttcacctataaagggcgattatccaccgactccgagacgacagctccaacggccgtctgctctcccgcagattccagatatcagctccatacgagcgtcttgcgacccatccgccgagtatgcgatcgtgatctcgatgtacgaagtatacaacgatcgtatattcgatcttctgaccccaccgatcaaatctcacgccacgaaggaataccgacgacgaccgcttctattcaagtgcaccgagacatcacccgaccgaaaggtagtagccggcctgcgcaaggtgatctgcagtactctaagagagacattgatggtacttgaggccggactacacgagagacgcgtagcaggcacaggcagcaacagcgtgtcatcgcgaagccacggcttcttctgcgtcgagatcaagaagcgacgtcgtggtcgcacgggcggccattggggaacaagcacattgagtatcgttgacctggctggtagtgagcgcgcaagagatgccaagacacaaggagctacgttggtggagggcggcaagatcaatgagagtttgatgtatctcggtcagtgtctgcagatgcagaccgatgcgagcaataacactaagccaaacctcgtacccttccgccaatgcaaactaaccgagctcctcttctcaaactccttcccctcccccaacaccgcccaccatcgccgcaacccgcagaaagccgtaatgattgcgacggccgatcccctgggcgacttcaacgcgacctcgcaaatcctacgatattccgctctcgcccgtgaagtaacagtcccgcgcatcccctcaataacctcaaccatcctagcaccacatgacacgaccgcagacctcagcagtccgatcggctccccggcatctcacagtcccgttttaacgcatagacaactcttccacccaccctccgcttctcattctcaccgaacattctcaccaatttccgatacagagcgcagcacaatggaaaatgccgcgcttgaaatctcccgcatggcagatctcatcgagacactctcctccgacctcgaaatagagcgacaagcgcgaatcgctgagcaggaagcacgcgtagcagcagaagcccacctcctctccctcgaggacagagttgaagagaaactcatcgacctcgagcaagagatccgcgaagaatgctacagcgactttgagcaacgtctcgctatcgagatgtctcgatggaaagcgtcgttcgcgctcgaacaagaacggggtgatgagcattgggatcggaaggttgagctactgggaagagccggcgttacgactaccgccggcgatagtggggatgagggggacaaggagaacgtgctgattgagaatttggaggaggagaatgaacggctccgaagagagatcggtgtgcttaagagagagttgggtggcaggacgccgacgaagagaaaagccctcgctgaacggggcgatttgaggagtagtgctagagactcaagagagatgagagaaagtactgtgaaggagagggagggggtcaaggatttgggacctaggatggaggcactgagagtgtctagtgggagtccgacgaagagagttaggaagttggggaagaagtgggaggggagtgttggggatgagtctttctag

SEQ ID NO: 40276 - protein, 840 aa, Muscodor strobelii
  misc_feature: SGI Peptide ID NO. 574035
  misc_feature (17)..(556): Pfam Id: PF00225 Pfam Desc: Kinesin motor domain
  misc_feature (17)..(507): Pfam Id: PF00225 Pfam Desc: Kinesin motor domain
MEPPQRPHTNLFDVFLRLRPPQAGNANAEKFLLVEEPTDGDAPTHITLNPPMDRRRAIEKFAFTRVFEEDATQLDLFQGTKVLPLVEGVLAPHGGDGTNGLLATLGMTGSGKTHTMLGSRSQRGLTQLALDVIFRSIQSNIVDYESSPMLETSIRSSDNSEASIYNASAFLENTFGEGVAPSRAGSRAATPMIVRTQRTDFAKSSTLATICPNLPGIYPESPGASVRLVRREDELSHVTLLKTPPGQKILNRPLKTPVTSFKSKLTNGSPTKKHFMNSTSAAQNKTVTKCSPIKGDYPPTPRRQLQRPSALPQIPDISSIRASCDPSAEYAIVISMYEVYNDRIFDLLTPPIKSHATKEYRRRPLLFKCTETSPDRKVVAGLRKVICSTLRETLMVLEAGLHERRVAGTGSNSVSSRSHGFFCVEIKKRRRGRTGGHWGTSTLSIVDLAGSERARDAKTQGATLVEGGKINESLMYLGQCLQMQTDASNNTKPNLVPFRQCKLTELLFSNSFPSPNTAHHRRNPQKAVMIATADPLGDFNATSQILRYSALAREVTVPRIPSITSTILAPHDTTADLSSPIGSPASHSPVLTHRQLFHPPSASHSHRTFSPISDTERSTMENAALEISRMADLIETLSSDLEIERQARIAEQEARVAAEAHLLSLEDRVEEKLIDLEQEIREECYSDFEQRLAIEMSRWKASFALEQERGDEHWDRKVELLGRAGVTTTAGDSGDEGDKENVLIENLEEENERLRREIGVLKRELGGRTPTKRKALAERGDLRSSARDSREMRESTVKEREGVKDLGPRMEALRVSSGSPTKRVRKLGKKWEGSVGDESF

SEQ ID NO: 40277 - DNA, 3904 bp, Muscodor strobelii
  misc_feature: SGI EST ID NO. CUFF.97455.0
  misc_feature: Variant of the nucleotide sequence at SEQ ID NO 40275
gtaatatcaagaccaaaagagtaaagcattcaaccatgcgatgcatcgcacgatgttacagccccggatatgttaggtaagtgtggtgatcaatcatcattcaactcaatcggaaggccatgtattgaaagtgtagtagctcatttattactttgaacttgccatacggtcatggtaagtattgaaagttataagaataagattgtgcatgttactgaatggcaggttatgctgtgacacctcaatgcggacagataggctgattgatatcaattcaacgcgccaacttcgctcttttcttcatccttagatcagcccgggtgctacagcaactgtagggagcattgtgatcattttaaaggtaggcaaatgtacaatataagttaggatggaaactgttgtgctactgctcgttgcgcgatgcaccgatgcaggcttgttgagttggttgggaagctgaggggtctgagacgaaataaaaataaagtggattgactccaacaggcgcggggcaggtgggacgcaaattcaggggtcttgtattcccctctcagcccctcctgtcgtcaggtccaaagccgaaatgtggctggtgacagggagcgggacgggctgctgacagcttctgtggcttgaacaacgtcagctctggtggttgctggtacaaccgatatggccccatcgcaaaacaacatcatgcaaacacagccaatgatgacccaagaggcatggccaatcatttcaactaaactacttcaatcaaacaactggaatcctgcaacacatcgtatctgcaacgctggttgcagattccgtacttgtacaaacggttgcattgatctcgtcgcattgtttttctgggcctgttgcacctgtacaaactgcgccttcttgaatcaattgcgttgactttatttacttgtgggaacgagttgaacatctcaatcgagaatccaaaataacgtccaagatcaacatggagcctcctcaaaggccgcacactaatctattcgatgtctttttgcggttgcgaccgcctcaagcaggcaatgccaacgccgagaagttcttgctggtagaagaaccgacggatggtgacgcaccaactcatatcacactgaacccgccaatggatcgcagacgcgcaattgagaaatttgcattcacacgcgtgtttgaggaagatgctactcagcttgacttattccagggaaccaaggtcctcccgctcgttgagggcgtgcttgcgccccatggcggtgatggtacgaatgggttgctagcgacgctgggaatgacaggatcgggcaagacacatactatgctcggatcaagaagccagcgcggcttgacgcaactggctctcgatgttatctttcgctcgattcagtcaaacattgtcgactatgagtcgtcacctatgctggagacaagcattcgctcctcagataactcagaagcatccatatacaatgcttcggccttcctagagaatacctttggcgagggcgtagctccatcgcgtgctggatcaagagcagccacaccaatgattggcgattatccaccgactccgagacgacagctccaacggccgtctgctctcccgcagattccagatatcagctccatacgagcgtcttgcgacccatccgccgagtatgcgatcgtgatctcgatgtacgaagtatacaacgatcgtatattcgatcttctgaccccaccgatcaaatctcacgccacgaaggaataccgacgacgaccgcttctattcaagtgcaccgagacatcacccgaccgaaaggtagtagccggcctgcgcaaggtgatctgcagtactctaagagagacattgatggtacttgaggccggactacacgagagacgcgtagcaggcacaggcagcaacagcgtgtcatcgcgaagccacggcttcttctgcgtcgagatcaagaagcgacgtcgtggtcgcacgggcggccattggggaacaagcacattgagtatcgttgacctggctggtagtgagcgcgcaagagatgccaagacacaaggagctacgttggtggagggcggcaagatcaatgagagtttgatgtatctcggtcagtgtctgcagatgcagaccgatgcgagcaataacactaaggtatgtcgcacatccttccccttgcaggagtatatttcatttactgacgtgcttatgcacagccaaacctcgtacccttccgccaatgcaaactaaccgagctcctcttctcaaactccttcccctcccccaacaccgcccaccatcgccgcaacccgcagaaagccgtaatgattgcgacggccgatcccctgggcgacttcaacgcgacctcgcaaatcctacgatattccgctctcgcccgtgaagtaacagtcccgcgcatcccctcaataacctcaaccatcctagcaccacatgacacgaccgcagacctcagcagtccgatcggctccccggcatctcacagtcccgttttaacgcatagacaactcttccacccaccctccgcttctcattctcaccgaacattctcaccaatttccgatacagagcgcagcacaatggaaaatgccgcgcttgaaatctcccgcatggcagatctcatcgagacactctcctccgacctcgaaatagagcgacaagcgcgaatcgctgagcaggaagcacgcgtagcagcagaagcccacctcctctccctcgaggacagagttgaagagaaactcatcgacctcgagcaagagatccgcgaagaatgctacagcgactttgagcaacgtctcgctatcgagatgtctcgatggaaagcgtcgttcgcgctcgaacaagaacggggtgatgagcattgggatcggaaggttgagctactgggaagagccggcgttacgactaccgccggcgatagtggggatgagggggacaaggagaacgtgctgattgagaatttggaggaggagaatgaacggctccgaagagagatcggtgtgcttaagagagagttgggtggcaggacgccgacgaagagaaaagccctcgctgaacggggcgatttgaggagtagtgctagagactcaagagagatgagagaaagtactgtgaaggagagggagggggtcaaggatttgggacctaggatggaggcactgagagtgtctagtgggagtccgacgaagagagttaggaagttggggaagaagtgggaggggagtgttggggatgagtctttctaggggctggttgtctaagttctaggatggatatcgctgtcgcatatatggcaggttacgcaaaagacggccgtggttgcgatgttgctgagaatcacgcggttgtgttttgagctgtgcggttggctttctgaaggcgtggatacccctgggagccgtgttgagtttcttcatgttcattatgggttaggggagttgagagggggtttggtgtatattgtttgctcttgtacttttcgtaaatggatacgtgttaaaaagaattgttatcgaggttgcgattgtggtcctgagtttgtggtgtggtatatgtccatcgtgtcaccaggcaagtgcattccagttgactggaaactcttccaagaatgatgttctcgacgcaacggcggagaatctcccccgttcccaggtcttggtcatgttcccctcccttatatcgcgtgctcggagccccgtaaggccatcggctatctcgcagagcgtgttgccttgccaccgacgaatccagtttgggtacgactcagaatagtccggccagtcttctagcgcattcatcacggtggacttatcgtctaattccaggatcgaaataagctcacgaagtgtaatgaagtgagtatatcgatcggtcatctggccggggttttcc

SEQ ID NO: 40278 - DNA, 1890 bp, Muscodor strobelii
  misc_feature: SGI cDNA ID NO. 574036
  misc_feature: Reduced expression when VOC is produced
  misc_feature: Encodes the peptide sequence at SEQ ID NO 40279
atgtcgacgtctcatgtcatcaccttgaaggtcaaggtccccacgacccccgtcaacaagaagaaggtccacaaggtcagcaatgtccgacgggactcgacctcgtcatcctcgctagatctgtctgatgaagggggctatacctccctcgacaacaacgtcgtcgaatctgaagatgacgaggaggatgtagaggcggccgaggaggagcacattctctctcacgagcgacaccaacaagctcgtcgctccccttggccgaccaacgaagacgaagacgaagatgcggaggatggagacgacgcagaagaagaggaagccgaagacggcgacgacgaggatgaggaccaggatcaggcagaggacgacaataccgacgacgaaggcatccccgaaaatacctcttgggagggattctctcccgagggtctgccacccgatgacgaggctggctcacccttgttgcccagtgcccagattctcaagcgccgcgtgcgctttgatgtccctgactcggaagacgacgagactgagacggacgaggagacggcctacaccaacggcatgttccccgacttgttcgtcgacaagagcactttggaccccactttccgccgcgaggtcgatcagaacgaagatgtcgactcggattcctctttctgggatcactacggaaccactggctccacttttgaggacgtaaatttcttcaatggcaatgatgcccagtatgaagatttagaggggaagattctgtctctctttgacgatgacaatagcacgcccgttgctaccccggcgactcaaaccggcatgtcaaccgcgctgtcgacgcccgtgccttcgcctgaaaagctcgagtacgacgaggacttggacgacgagctcgacggctatctatccgatggagacaccaccgatgaggaagagcctcctccacgacctgaccggcgtaagacgcggagagagccgttgatcgaggagtcggaagcgtccgatgtcgagatcatcaaacgccgccgtggccaacctagagtcggtaaattcagtatcgatgtttccaaaaagcccattgccatgatccacccgaggacgggcaaaatgatcgtcttcacgaacaaagaaacagcgggcttggatctatctccggagcagtttcggaggccatcggctcctgtcctggccaaccctggaaacttcaccatgactgccctgacctctaacatgatatcatccaatacctatggcgacttcatgaacatgcgcactgatgccgctactgatgttcccaccgatgactggtggttcaatccttcaaatctagtagatctagatgggaccttttatgacgcatcattgtttgatgacgaagtgttcgatgaagcatccgactcattcgcagaatacgtcgatgaggatgaagaagccctgaaaattaatgattttctggagcttggtaatgatagcagttcatcggacgaagaagaaaacaaagacaaagacgatggggaagacgacatattccggacccctgcccgtccggactcgtcgggcaatgactttttcaatcacctcttcggcaccgactctcaggtcgtcggcgcatttcgcaaagatcagcagactcatcagttgctgacgcgcaacaaagccaccagggattcattggcattctctactccctactacgatggtacattgcgcggaatcaaggacggccggctcgattctgccaatgttcccatctctcccctgcgtcgtcagaagcgaaatatgccggatctgaccagcagcccgcttgcgtcatcgaagagaaaggcctcttcggaacaacagtcggggcacaagagacaacgcagtatgcccgatgttggccccctccacctctaa

SEQ ID NO: 40279 - protein, 629 aa, Muscodor strobelii
  misc_feature: SGI Peptide ID NO. 574036
  misc_feature: Useful for introducing or modulating the production of volatile compounds
MSTSHVITLKVKVPTTPVNKKKVHKVSNVRRDSTSSSSLDLSDEGGYTSLDNNVVESEDDEEDVEAAEEEHILSHERHQQARRSPWPTNEDEDEDAEDGDDAEEEEAEDGDDEDEDQDQAEDDNTDDEGIPENTSWEGFSPEGLPPDDEAGSPLLPSAQILKRRVRFDVPDSEDDETETDEETAYTNGMFPDLFVDKSTLDPTFRREVDQNEDVDSDSSFWDHYGTTGSTFEDVNFFNGNDAQYEDLEGKILSLFDDDNSTPVATPATQTGMSTALSTPVPSPEKLEYDEDLDDELDGYLSDGDTTDEEEPPPRPDRRKTRREPLIEESEASDVEIIKRRRGQPRVGKFSIDVSKKPIAMIHPRTGKMIVFTNKETAGLDLSPEQFRRPSAPVLANPGNFTMTALTSNMISSNTYGDFMNMRTDAATDVPTDDWWFNPSNLVDLDGTFYDASLFDDEVFDEASDSFAEYVDEDEEALKINDFLELGNDSSSSDEEENKDKDDGEDDIFRTPARPDSSGNDFFNHLFGTDSQVVGAFRKDQQTHQLLTRNKATRDSLAFSTPYYDGTLRGIKDGRLDSANVPISPLRRQKRNMPDLTSSPLASSKRKASSEQQSGHKRQRSMPDVGPLHL

SEQ ID NO: 40280 - DNA, 3265 bp, Muscodor strobelii
  misc_feature: SGI EST ID NO. CUFF.97497.1
  misc_feature: Variant of the nucleotide sequence at SEQ ID NO 40278
gcaggaatcaaccagcccaacccaacacccaagacaacgaagtcgcactatccaatatctagaacccagtctcccactacagctctatcgaattcacaatgccgtcggccgtcgctgagctgtgaacacccactgcgggacacgatgcgccgtcgtgttccgcagtccgtcagcccaccgagacattcacccatcaagagatattcgacagagttcaccagacttcccgacccgtgaagcgatgctttagagtagaggcatcgacagaaagcaacggacagtctacacacaacccagacaccatttcatgcatcgttgaatacgcccaatataccgctcggggccctgcatttcaacacgacagccatatgatatacctgcacctcctagtcgatgttcatcacgctgctactgccggtcttcaacacagaatcgacacgatacatctccccatatcgtaactgaacgcacagcatacatcctctgctgcatctctcaacccattgccagtgacttgtagaaatacgtcacagaaacagcgcaattccaattccaaaatccaatcttaaaagtaaaagtaattgactataattctgcacacacgcatcccccaccaaatccaactagttggtcaaacatcatcacaacgcacggcctcaccgccgtttgtactcgacacacgcacacatactataccccaacccacaaacacacccctgcagccccctgcatattctcttgggattacatatctgcatataatttgtgccacggaaacatgtcgacgtctcatgtcatcaccttgaaggtcaaggtccccacgacccccgtcaacaagaagaaggtccacaaggtcagcaatgtccgacgggactcgacctcgtcatcctcgctagatctgtctgatgaagggggctatacctccctcgacaacaacgtcgtcgaatctgaagatgacgaggaggatgtagaggcggccgaggaggagcacattctctctcacgagcgacaccaacaagctcgtcgctccccttggccgaccaacgaagacgaagacgaagatgcggaggatggagacgacgcagaagaagaggaagccgaagacggcgacgacgaggatgaggaccaggatcaggcagaggacgacaataccgacgacgaaggcatccccgaaaatacctcttgggagggattctctcccgagggtctgccacccgatgacgaggctggctcacccttgttgcccagtgcccagattctcaagcgccgcgtgcgctttgatgtccctgactcggaagacgacgagactgagacggacgaggagacggcctacaccaacggcatgttccccgacttgttcgtcgacaagagcactttggaccccactttccgccgcgaggtcgatcagaacgaagatgtcgactcggattcctctttctgggatcactacggaaccactggctccacttttgaggacgtaaatttcttcaatggcaatgatgcccagtatgaagatttagaggggaagattctgtctctctttgacgatgacaatagcacgcccgttgctaccccggcgactcaaaccggcatgtcaaccgcgctgtcgacgcccgtgccttcgcctgaaaagctcgagtacgacgaggacttggacgacgagctcgacggctatctatccgatggagacaccaccgatgaggaagagcctcctccacgacctgaccggcgtaagacgcggagagagccgttgatcgaggagtcggaagcgtccgatgtcgagatcatcaaacgccgccgtggccaacctagagtcggtaaattcagtatcgatgtttccaaaaagcccattgccatgatccacccgaggacgggcaaaatgatcgtcttcacgaacaaagaaacagcgggcttggatctatctccggagcagtttcggaggccatcggctcctgtcctggccaaccctggaaacttcaccatgactgccctgacctctaacatgatatcatccaatacctatggcgacttcatgaacatgcgcactgatgccgctactgatgttcccaccgatgactggtggttcaatccttcaaatctagtagatctagatgggaccttttatgacgcatcattgtttgatgacgaagtgttcgatgaagcatccgactcattcgcagaatacgtcgatgaggatgaagaagccctgaaaattaatgattttctggagcttggtaatgatagcagttcatcggacgaagaagaaaacaaagacaaagacgatggggaagacgacatattccggacccctgcccgtccggactcgtcgggcaatgactttttcaatcacctcttcggcaccgactctcaggtcgtcggcgcatttcgcaaagatcagcagactcatcagttgctgacgcgcaacaaagccaccagggattcattggcattctctactccctactacgatggtacattgcgcggaatcaaggacggccggctcgattctgccaatgttcccatctctcccctgcgtcgtcagaagcgaaatatgccggatctgaccagcagcccgcttgcgtcatcgaagagaaaggcctcttcggaacaacagtcggggcacaagagacaacgcagtatgcccgatgttggccccctccacctctaaactctcctacgactttgaaagaagtcgatcaccatgcctcttctggagacatctccaaaaaacgccgatggacggcatgacctatcactaggtcatcccaggccacgaacatcgacgcgcgctttcaccaaatgtgttatgaccgatgtttttcctttccgtctacctttctttctttctttgtcttttaacgttactgacgtacggttcgatttcaatgccgataacgaatctccttttttgttcctgcccgaaaggctctgtccgctcagcgatgaaggtccacctacaccatgtgtaatgagcacttaccaagtgcctcactttgctgtaatacttgtcttttcttccggattactagactggatagagggatacagacaaaagttacgaggcgggtgtttctatctttctgcgcacgagatggaaggttgaagggtgtgtgtctgttagggagttgatggtttcattggaatgttgtttgatacccccgaggcttggccttcgtgctgagatgcgcgatgatgggcagggggctgatttggcaggtgttagtgtagagagaatacaaaatttcttgttcatcttttgtgcttt

SEQ ID NO: 40281 - DNA, 1158 bp, Muscodor strobelii
  misc_feature: SGI cDNA ID NO. 574037
  misc_feature: Elevated expression when VOC is produced
  misc_feature: Encodes the peptide sequence at SEQ ID NO 40282
atgccttgggataagttgagtatcccgaaccatgctctcgccaatggtgatgtccccgtcgccggccttgaggtagttatcgtcaaaggcggggctcttctcttccccttcattcatcactgcgccggcgatggatcacacatggctatgttcctcgacatgcttgcaaccgcaacacgcctcgtgcagggaacaatggaaaaagctcttccacccgcaccacccgtcaacctctcctttaagataaaccgaacggacaagagtaaagaggaaagcgcggaattctacaagcttctgagagaatgtccggagtaccgctacagtgacaagcgcatacagccctgtgcctttacggaagagctgtccgataccactcctctagacatggcaaaactcaaggattccgagatcttcgctattcccaaaagcgatattgcaagctgcaagacagcccttggtcgacagaaattaccaagtacattcacgttgctggccgccctattctggtcacaagttgcgcaggcccgaaaggatgaagagtttcaaaagcttaccaggccaccaccgggttcagaacatagtgaatcaatctcaaaacatattgcgcgaatgataatgcccgtagactggacaaaacgagttgcacccgggaagaaacctttcggattttacgctctttgggccgttgcctctattgattataacgttcttctggccgcagcagactgtcggcccgaagtcaatgagcaaacgagaaactcagctcttctgcaggtcgttgaagccatcgaagcatccatcaacagggtcgaccaagcatacgtggacaagcgatttacgcttgtccagcatgcctccgatcctcgtgttttgggtcttcacttcgacccgaaaagcaaaagggacatgattttcaatacatggcaacacatgggtgcagatttgaagtggaatctaggtatgtcaaaggagggctctcgagatgttcagtcgatcatccgcaaggtgaatattccctcgcctgggtcaggtctcatacttcccgcgcagaaagacgccgatgagctagagattcaagtcaatatgccccccgagagcatggtgaagttcaaagagaatgaactagggaagtatctacaagacggcactgcccactaa

SEQ ID NO: 40282 - protein, 385 aa, Muscodor strobelii
  misc_feature: SGI Peptide ID NO. 574037
  misc_feature: Useful for introducing or modulating the production of volatile compounds
MPWDKLSIPNHALANGDVPVAGLEVVIVKGGALLFPFIHHCAGDGSHMAMFLDMLATATRLVQGTMEKALPPAPPVNLSFKINRTDKSKEESAEFYKLLRECPEYRYSDKRIQPCAFTEELSDTTPLDMAKLKDSEIFAIPKSDIASCKTALGRQKLPSTFTLLAALFWSQVAQARKDEEFQKLTRPPPGSEHSESISKHIARMIMPVDWTKRVAPGKKPFGFYALWAVASIDYNVLLAAADCRPEVNEQTRNSALLQVVEAIEASINRVDQAYVDKRFTLVQHASDPRVLGLHFDPKSKRDMIFNTWQHMGADLKWNLGMSKEGSRDVQSIIRKVNIPSPGSGLILPAQKDADELEIQVNMPPESMVKFKENELGKYLQDGTAH

SEQ ID NO: 40283 - DNA, 1286 bp, Muscodor strobelii
  misc_feature: SGI EST ID NO. CUFF.97470.0
  misc_feature: Variant of the nucleotide sequence at SEQ ID NO 40281
cgtcgccggccttgaggtagttatcgtcaaaggcggggctcttctcttccccttcattcatcactgcgccggcgatggatcacacatggctatgttcctcgacatgcttgcaaccgcaacacgcctcgtgcagggaacaatggaaaaagctcttccacccgcaccacccgtcaacctctcctttaagataaaccgaacggacaagagtaaagaggaaagcgcggaattctacaagcttctgagagaatgtccggagtaccgctacagtgacaagcgcatacagccctgtgcctttacggaagagctgtccgataccactcctctagacatggcaaaactcaaggattccgagatcttcgctattcccaaaagcgatattgcaagctgcaagacagcccttggtcgacagaaattaccaagtacattcacgttgctggccgccctattctggtcacaagttgcgcaggcccgaaaggatgaagagtttcaaaagcttaccaggccaccaccgggttcagaacatagtgaatcaatctcaaaacatattgcgcgaatgataatgcccgtagactggacaaaacgagttgcacccgggaagaaacctttcggattttacgctctttgggccgttgcctctattgattataacgttcttctggccgcagcagactgtcggcccgaagtcaatgagcaaacgagaaactcagctcttctgcaggtcgttgaagccatcgaagcatccatcaacagggtcgaccaagcatacgtggacaagcgatttacgcttgtccagcatgcctccgatcctcgtgttttgggtcttcacttcgacccgaaaagcaaaagggacatgattttcaatacatggcaacacatgggtgcagatttgaagtggaatctaggtatgtcaaaggagggctctcgagatgttcagtcgatcatccgcaaggtgaatattccctcgcctgggtcaggtctcatacttcccgcgcagaaagacgccgatgagctagagattcaagtcaatatgccccccgagagcatggtgaagttcaaagagaatgaactagggaagtatctacaagacggcactgcccactaagagctctgacgtcgagctgtaagagtactactctcatcgactctgtcattatccaaattaattcctttctttcaaactagacttagatccgctcattttactatagcgctagatgcgatggactctcctaatgctcctagatctagattagacaaacgctctttaatatttactcacaactgag

SEQ ID NO: 40284 - DNA, 597 bp, Muscodor strobelii
  misc_feature: Internal transcribed spacer 1
tccgtaggtgaacctgcggagggatcattacagagttttctaaactcccaaccctatgtgaacttacctttgttgcttcggcggcggaggctaccctgcgggggattaccacctagtggttaccctgcagtctcaggtacatctgttacccggtagtcatccccgccggcggccaactaaactctgttttctttggaattctgaatcataaacttaataagttaaaactttcaacaacggatctcttggttctggcatcgatgaagaacgcagcgaaatgcgataagtaatgtgaattgcagaattcagtgaatcatcgaatctttgaacgcacattgcgcccattagcattctagtgggcatgcctgttcgagcgtcatttcaccacttaagccctgttgcttagcgttgggagcctacggcatagcccgtagctccttaaagtgattggcggagttggttctcactctaagcgtagtaactatatctcgcttctgtagtagttccggcccctgccgtaaaaccccttatacaaaagttgacctcggatcaggtaggaatacccgctgaacttaagcatatcaataagcggaggaa

SEQ ID NO: 40285 - DNA, 870 bp, Muscodor strobelii
  misc_feature: 18S ribosomal RNA gene, partial sequence
gccgcggtaattccagctccaatagcgtatattaaagttgttgcagttaaaaagctcgtagttgaaccttgggcctggctggccggtccgcctcaccgcgtgcactggttcggccgggcctttccctctggggagccctatgcctttcattaggtgtagtggggaaccaggacttttactgtgaaaaaattagagtgttcaaagcaggcctatgctcgaatacatcagcatggaataatagaataggacgtgtggttctattttgttggtttctaggaccgccgtaatgattaatagggacagtcgggggtgtcagtattcaattgtcagaggtgaaattcttggatttattgaagactaactactgcgaaagcattcaccaaggatgttttcattaatcaggaacgaaagttaggggatcgaagacgatcagataccgtcgtagtcttaaccataaactatgccgactagggatcgggcggtgttattttttgacccgctcggcaccttacgagaaatcaaagtctttgggttctggggggagtatggtcgcaaggctgaaacttaaagaaattgacggaagggcaccaccaggagtggagcctgcggcttaatttgactcaacacggggaaactcaccaggtccagacacaatgaggattgacagattgagagctctttcttgattttgtgggtggtggtgcatggccgttcttagttggtggagtgatttgtctgcttaattgcgataacgaacgagaccttaacctgctaaatagcccctattgctttggcagtaggctggcttcttagagggactatccgctcaagcggatggaagtttgaggcaataacaggtctgtgatgccc

SEQ ID NO: 40286 - DNA, 19 bp, Artificial Sequence
  PCR primer
tccgtaggtgaacctgcgg

SEQ ID NO: 40287 - DNA, 20 bp, Artificial Sequence
  PCR primer
tcctccgcttattgatatgc
